(19) United States
(12) Patent Application Publication
(10) Pub. No.: US 2022/0315931 A1
(43) Pub. Date: Oct. 6, 2022

(54) IMMUNE CELLS EXPRESSING RECEPTOR SPECIFIC TO CLASS I MHC MOLECULE AND INTERFERING RNA FOR BETA2 MICROGLOBULIN GENE

(71) Applicant: A2 Biotherapeutics, Inc., Agoura Hills, CA (US)

(72) Inventors: Agnes E. HAMBURGER, Newbury Park, CA (US); Carl Alexander KAMB, Westlake Village, CA (US); Breanna DIANDRETH, Agoura Hills, CA (US)

(21) Appl. No.: 17/706,134

(22) Filed: Mar. 28, 2022

Related U.S. Application Data
(60) Provisional application No. 63/166,765, filed on Mar. 26, 2021.

(51) Int. Cl. C12N 15/113; C12N 5/0783; C12N 15/85; A61P 35/00; A61K 35/17

(52) U.S. Cl. CPC C12N 15/1138; C12N 5/0636; C12N 15/85; A61P 35/00; A61K 35/17; C12N 2310/14; C12N 2310/531; C12N 2800/107

(57) ABSTRACT

The disclosure relates to immune cells for use in adoptive cell therapy useful for treating a disease or disorder, for example, cancer. The disclosure provides immune cells with reduced or eliminated B2M expression, that express an inhibitory receptor, methods of making same, shRNAs targeting B2M mRNA, and polynucleotides and vectors encoding same.

### CROSS-REFERENCE To RELATED APPLICATION

[0001] This application claims the benefit of U.S. Provisional Patent Application No. 63,166,765, filed Mar. 26, 2021, which is incorporated by reference herein in its entirety.

### INCORPORATION BY REFERENCE OF SEQUENCE LISTING

[0002] The present application is being filed with a Sequence Listing in electronic format. The Sequence Listing is provided as a file entitled A2BI_029_01US_SeqList ST25.txt, created on Mar. 28, 2022 and is 1,519 kilobytes in size. The information in electronic format of the Sequence Listing is incorporated by reference in its entirety.

### BACKGROUND

[0003] Cell therapy is a powerful tool for the treatment of various diseases, particularly cancers. In conventional adoptive cell therapies, immune cells are engineered to express specific receptors, for example chimeric antigen receptors (CARs) or T Cell Receptors (TCRs), which direct the activity of the immune cells to cellular targets via interaction of the receptor with a ligand expressed by the target cell. Transplant of donor-derived T cells may be used to treat solid tumors and hematological malignancies. For example, T cells genetically modified to express a chimeric antigen receptor specific to CD19 effectively treat B-cell lymphoma when transplanted into patients. Specificity of transplanted T cells for target cells, such as cancer cells, can be increased by modifying the cells to express not only a first activator receptor specific to a target cell type, but also a second inhibitory receptor that prevents activation of the immune cells by non-target cells that express the ligand for the inhibitory receptor. The presence of an inhibitory receptor can result in unintentional inactivation or activation of the immune cell through autocrine binding/signaling mechanisms, or failure of the inhibitory mechanism by in cis blocking from the endogenous antigen for the inhibitory receptor. Autocrine signaling-mediated inactivation/activation of an immune cell used in cell therapy reduces the therapy's efficacy and raises the risk of unchecked activation. Thus, there remains a need for immune cells that express inhibitory receptors and are not functionally affected through autocrine signaling mechanisms.

[0004] Immune cell products expressing this dual receptor system may be made using cells from a donor other than the patient who will receive the immune cell product. When the transplanted immune cells are not derived from the recipient, the transplant is termed an “allogeneic” transplant. Allogeneic transplant is reviewed in Ruella et al. BioDrugs. 31:473-81 (2017) PMID: 29143249; Kim et al. Biomolecules. 10:263 (2020) PMID: 32050611; and Yang et al. Curr Opin Hematol. 22:509-15 (2015) PMID: 26390167.

[0005] Allogeneic transplant of immune cells can cause complications in the recipient, decreasing the effectiveness of adoptive cell therapy and causing potentially life threatening side effects. For example, transplanted allogeneic T cells can view healthy cells of the recipient as foreign, which leads to a cytotoxic T-cell lymphocyte (CTL) response against the cells of the recipient (Graft versus Host Disease, or GvHD). In addition, the recipient's own immune system may recognize the transplanted allogeneic cells as foreign, and eliminate the transplanted cells (Host versus Graft Disease, or HvGD).

[0006] The disclosure provides compositions and methods to reduce autocrine signaling in, increase the efficacy and safety of, and reduce potential complications of, immune cells that have been engineered to express a combination of activator and inhibitor receptors that specifically direct the transplanted immune cells to target particular cells, such as cancer cells. The disclosure also provides compositions and methods to reduce increase the efficacy and safety of, and reduce potential complications of, allogeneic immune cells that have been engineered to express the combination of activator and inhibitor receptors.

### SUMMARY

[0007] The disclosure generally relates to immune cells expressing engineered receptors for use in adoptive cell therapy. Immune cells of the disclosure have reduced or eliminated binding in cis or autocrine signaling caused by binding of an engineered receptor to an HLA-A*02 ligand expressed by the immune cell. This binding/autocrine-signaling can be reduced or eliminated by expression of a B2M-targeting interfering RNA by the immune cell.

[0008] Accordingly, the disclosure provides immune cells comprising an inhibitory receptor comprising a ligand binding domain specific to a class I major histocompatibility complex (MHC-I) molecule, or a peptide-MHC complex thereof; wherein expression and/or function of beta-2- microglobulin (B2M) in said immune cell has been reduced or eliminated.

[0009] In one aspect, the disclosure provides an immune cell comprising an inhibitory receptor comprising a ligand binding domain specific to a class I major histocompatibility complex (MHC-I) molecule, or a peptide-MHC complex thereof; wherein expression and/or function of beta-2- microglobulin (B2M) in said immune cell has been reduced or eliminated. In some embodiments, the immune cell further comprising an interfering RNA, comprising a sequence complementary to a sequence of a B2M mRNA. In some embodiments, the interfering RNA is capable of inducing RNAi-mediated degradation of the B2M mRNA.

[0010] In some embodiments, the interfering RNA is a short hairpin RNA (shRNA). In some embodiments, the shRNA comprises a first sequence, having from 5′ end to 3′ end a sequence complementary to the B2M mRNA; and a second sequence, having from 5′ end to 3′ end a sequence complementary to the first sequence, wherein the first sequence and the second sequence form the shRNA. In some embodiments, the first sequence and second sequence are present on a single stranded polynucleotide, wherein the first sequence and second sequence are separated by 4, 5, 6, 7, 8, 9, 10, 11, 12, 13, 14, or 15 nucleotides, wherein the 4, 5, 6, 7, 8, 9, 10, 11, 12, 13, 14, or 15 nucleotides form a loop region in the shRNA. In some embodiments, the loop region comprises a sequence selected from SEQ ID NOs: 5030-5043.

[0011] In some embodiments, the B2M mRNA sequence comprises a part of a coding sequence. In some embodiments, the B2M mRNA sequence comprises a part of an untranslated region. In some embodiments, the first sequence is 18, 19, 20, 21, or 22 nucleotides. In some embodiments, the first sequence is complementary to a sequence selected from SEQ ID NOs: 400-5019. In some embodiments, the first sequence has GC content greater than or equal to 25% and less than 60%. In some embodiments, the first sequence is complementary to a sequence selected from SEQ ID NOs: 400-3995. In some embodiments, the first sequence does not comprise 4 nucleotides of the same base or a run of seven C or G bases. In some embodiments, the first sequence is complementary to a sequence selected from SEQ ID NOs: 400-3399. In some embodiments, the first sequence is 21 nucleotides. In some embodiments, the first sequence is complementary to a sequence selected from SEQ ID NOs: 400-981. In some embodiments, the first sequence is selected from SEQ ID NOs: 400-681 or SEQ ID NOs: 400-537.

[0012] In some embodiments, the shRNA further comprises a 5′ flank sequence and a 3′ flank sequence, wherein the 5′ flank sequence is joined to the 5′ end of the first sequence, and wherein the 3′ flank sequence is joined to the 3′ end of the second sequence. In some embodiments, the 5′ flank sequence is selected from SEQ ID NO: 5044-5047. In some embodiments, the 3′ flank sequence is selected from SEQ ID NO: 5048-5050.

[0013] In some embodiments, the shRNA is operably linked to a promoter. In some embodiments, the promoter is a mammalian promoter, viral promoter or synthetic promoter. In some embodiments, the promoter is selected from a U6 promoter, a wild-type H1 promoter, a wild-type 7SK promoter, an Ef1a promoter. In some embodiments, the promoter sequence is selected from SEQ ID NOs: 5051-5054.

[0014] In some embodiments, the immune cell is a T cell, B cell, or Natural Killer (NK) cell. In some embodiments, the immune cell is autologous to a subject. In some embodiments, the immune cell is allogeneic to a subject. In some embodiments, the immune cell is non-natural. In some embodiments, the immune cell is isolated.

[0015] In one aspect, the disclosure provides the immune cell described herein, for use as a medicament. In some embodiments, the medicament is for the treatment of cancer in a subject in need thereof.

[0016] In one aspect, the disclosure provides a pharmaceutical composition comprising a plurality of the immune cells described herein. In some embodiments, the pharmaceutical composition comprises a pharmaceutically acceptable carrier, diluent, or excipient. In some embodiments, the pharmaceutical composition comprises a therapeutically effective amount of the immune cells.

[0017] In one aspect, the disclosure provides a method of treating cancer with an adoptive cell therapy, comprising administering to the subject a plurality of the immune cell described herein or the pharmaceutical composition described herein.

[0018] In one aspect, the disclosure provides a vector comprising the interfering RNA (e.g. an shRNA) described herein. In some embodiments, the vector comprises an interfering RNA, wherein the interfering RNA comprises an shRNA that targets a B2M mRNA sequence, wherein the shRNA comprises a first sequence, having from 5′ to 3′ a sequence complementary to the B2M mRNA; and a second sequence, having from 5′ to 3′ end a sequence complementary to the first sequence, wherein the first sequence and the second sequence form the shRNA. In some embodiments, the vector is a viral vector. In some embodiments, the viral vector is a lentiviral vector.

[0019] In some embodiments, the B2M mRNA sequence comprises a coding sequence. In some embodiments, the B2M mRNA sequence comprises an untranslated region. In some embodiments, the first sequence is 18, 19, 20, 21, or 22 nucleotides. In some embodiments, the first sequence is complementary to a sequence selected from SEQ ID NOs: 400-5019. In some embodiments, the first sequence has GC content greater than or equal to 25% and less than 60%. In some embodiments, the first sequence is complementary to a sequence selected from SEQ ID NOs: 400-3995. In some embodiments, the first sequence does not comprise 4 nucleotides of the same base or a run of seven C or G bases. In some embodiments, the first sequence is complementary to a sequence selected from SEQ ID NOs: 400-3399. In some embodiments, the first sequence is 21 nucleotides. In some embodiments, the first sequence is complementary to a sequence selected from SEQ ID NOs: 400-981. In some embodiments, the first sequence is complementary to a sequence selected from SEQ ID NOs: 400-681 or 400-537.

[0020] In some embodiments, the first sequence and second sequence are present on a single stranded polynucleotide, wherein the first sequence and second sequence are separated by 4, 5, 6, 7, 8, 9, 10, 11, 12, 13, 14, or 15 nucleotides, wherein the 4, 5, 6, 7, 8, 9, 10, 11, 12, 13, 14, or 15 nucleotides form a loop region in the shRNA. In some embodiments, the loop region comprises a sequence selected from SEQ ID NOs: 5030-5043.

[0021] In some embodiments, the shRNA further comprises a 5′ flank sequence and a 3′ flank sequence, wherein the 5′ flank sequence is joined to the 5′ end of the first sequence, and wherein the 3′ flank sequence is joined to the 3′ end of the second sequence. In some embodiments, the 5′ flank sequence is selected from SEQ ID NO: 5044-5047. In some embodiments, the 3′ flank sequence is selected from SEQ ID NO: 5048-5050.

[0022] In some embodiments, the shRNA is operably linked to a promoter. In some embodiments, the promoter is a mammalian promoter, viral promoter or synthetic promoter. In some embodiments, the promoter is selected from a U6 promoter, a wild-type H1 promoter, a wild-type 7SK promoter, an Ef1a promoter. In some embodiments, the promoter sequence is selected from SEQ ID NOs: 5051-5054.

[0023] In some embodiments, the vector described herein further comprises a polynucleotide encoding an inhibitory receptor comprising a ligand binding domain specific to a class I major histocompatibility complex (MHC-I) molecule, or a peptide-MHC complex thereof.

[0024] In one aspect, the disclosure provides a method of producing an immune cell with reduced autocrine binding/signaling comprising transducing and/or transfecting the immune cell with the vector described herein. In some embodiments, the method comprises transducing the immune cell with a first vector comprising a sequence encoding an activator receptor and a second vector comprising a sequence encoding an inhibitory receptor, thereby producing an immune cell expressing the activator and inhibitory receptors. In some embodiments, prior to the transducing and/or transfecting steps, the immune cell comprises a polynucleotide or vector encoding an interfering RNA targeting a B2M mRNA. In some embodiments, the inhibitory receptor specifically binds to an HLA-A*02 pMHC antigen and the target gene comprises HLA-A*02.

[0025] In one aspect, the disclosure provides a method of manufacturing a composition comprising immune cells with reduced autocrine binding/signaling comprising: a) providing immune cells from a subject suffering from or at risk for cancer or a hematological malignancy; and b) transducing and/or transfecting the immune cell with the vector described herein. In some embodiments, prior to the transducing and/or transfecting steps, the immune cell comprises a polynucleotide encoding activator and/or inhibitory receptors. In some embodiments, the method further comprises transducing the immune cell with a first vector comprising a sequence encoding the activator receptor and a second vector comprising a sequence encoding the inhibitory receptor, thereby producing an immune cell expressing the activator and inhibitory receptors.

[0026] In one aspect, the disclosure provides a method of treating a subject in need thereof comprising: a) providing immune cells from a subject suffering from or at risk for cancer or a hematological malignancy; b) transducing the immune cell with the vector described herein; and c) administering the immune cell to the subject.

### BRIEF DESCRIPTION OF THE DRAWINGS

[0027] A better understanding of the features and advantages of the present invention will be obtained by reference to the following detailed description that sets forth illustrative embodiments, in which the principles of the invention are utilized, and the accompanying drawings of which:

[0028] FIG. 1 is a diagram illustrating hemizygous tumor cells forming a tumor against a background of heterozygous cells that compose normal tissue. The hemizygous tumor cells express only Target A, and have lost Target B due to loss of heterozygosity (LOH), while the normal cells express both Target A and Target B. This genetic difference can be exploited to create tumor-selective cytotoxic therapeutics that are blocked by Target B and activated by Target A, thereby selectively killing tumors.

[0029] FIG. 2A is a diagram showing an exemplary architecture of a dual targeted therapeutic based on LOH in tumors. In this example, there is cell-based integration of activator and blocker signals from two receptors.

[0030] FIG. 2B is a series of diagrams showing various activator and receptor formats and combinations.

[0031] FIG. 3A is a pair of diagrams that show exemplary dual receptor constructs of the disclosure in TCR format. In this example, activator and inhibitor (blocker) ligand binding domains (LBDs) are each fused separately to the CD3 gamma subunit of the TCR.

[0032] FIG. 3B is diagram and a table that show exemplary dual receptor constructs of the disclosure in CAR format. Exemplary ITIM and inhibitor domains of the inhibitor CAR are shown in the table at right.

[0033] FIG. 4A is a set of plots showing that engineered receptors with HLA-A*02 specific blocker ligand binding domains (LBDs) lose blocking ability in the presence of A*02+ donors (1) and A*02-blocker is expressed but occupied by HLA-A*02 cis interaction (2). An HLA-A*02-blocker binds to HLA-A*02 in cis and hinders blocker function in Jurkat and in primary T cells.

[0034] FIG. 4B is a diagram showing an autocrine signaling mechanism in an immune cell expressing an inhibitory receptor. The diagram shows that knockout of natively expressed MHC class I polypeptides reduces inhibition mediated by autocrine signaling.

[0035] FIG. 5 is a schematic showing illustrative regions of the B2M mRNA targeted by interfering shRNAs of the disclosure.

[0036] FIG. 6 is a series of histograms and plots derived from fluorescence activated cell sorting (FACS) analysis of HLA-A*02 expressing Jurkat cells transfected with shRNA of the disclosure that target B2M mRNA. The shRNA knockout efficiency of HLA-A*02 expression was measured by staining Jurkat cells with fluorescently labeled anti-HLA-A*02 antibody (HLA-A*02), following transfection with shRNA. Knockout efficiency of HLA-A, HLA-B, and HLA-C (HLA Class I) was also determined by staining the Jurkat cells with a fluorescently labeled anti-HLA-A/B/C (HLA Class I) antibody.

[0037] FIG. 7 is a series of plots and histograms showing Jurkat cell activation and the binding capacity of the HLA-A*02 blocker module (inhibitory receptor) to its ligand, pMHC tetramer, in the presence (right) and absence (left) of B2M targeting shRNA.

### DETAILED DESCRIPTION

[0038] The inventors have developed a solution to the problems of identifying suitable therapeutic targets and achieving cell selectivity in the treatment of diseases, particularly cancers, with adoptive cellular therapy. The primary object of the invention is an immune cell used in adoptive cell therapy that has reduced autocrine signaling. The immune cell can target cells, for example, based on loss of heterozygosity (FIG. 1). The immune cells use a two receptor system, in which activator and inhibitory signals are integrated at the cellular level within the immune cells (FIGS. 2A, 2B, 3A and 3B), by which selective targeting of tumor but not non-tumor cells is achieved. Differences in expression of surface proteins that are absent or lost in target cells but present in normal cells are thereby converted to a targeted anti-tumor cell therapy. These differences improve targeting by cell therapies, and protect normal cells from the cytotoxic effects of effector cells used for adoptive cell therapies.

[0039] The two receptor system described herein can be expressed in allogeneic immune cells specifically engineered to decrease complications such as graft versus host disease (GvHD) and host versus graft disease (HvG).

[0040] The two receptor system described herein can also be expressed in autologous immune cells. These autologous immune cells can be specifically engineered to decrease complications such as inhibitory signals between the immune cells used in the adoptive therapy.

[0041] The inhibitory signals described herein, in some embodiments, are mediated by an inhibitory receptor, expressed by immune cells described herein, comprising a ligand binding domain specific to a class I major histocompatibility complex (MHC-I) molecule, or a peptide-MHC complex thereof. However, native expression of an MHC-I molecule by the immune cells can potentially bind to and activate or inactivate the inhibitory receptor. Such binding and activation/inactivation can occur through both inter- and intra-cellular interactions. Inter-cellular binding and activation/inactivation occurs when a natively expressed MHC-I molecule on immune cells binds an inhibitory receptor on a separate engineered immune cell expressing an inhibitory receptor. Intra-cellar inhibitory receptor binding can occur when, for example, the inhibitory receptor binds to an MHC-I molecule natively expressed on the same immune cell (FIGS. 4A and 4B). As described herein, the intra-cellular binding/signaling of the inhibitory receptor on engineered immune cells is referred to as autocrine signaling or binding. Intra-cellular inactivation can result in undesired inhibition at, for example, the site of a target activator or in a preparation or composition comprising a plurality of immune cells expressing the inhibitory receptor. The inventors of the present disclosure have recognized that the undesired autocrine signaling and binding can be suppressed if the immune cell has reduced or eliminated beta-2-microglobulin (B2M) expression or function. B2M expression or function can be reduced or eliminated by targeting B2M with an interfering RNA molecule. (FIG. 4B). In some embodiments, the immune cell comprises an interfering RNA, e.g. an shRNA complementary to a portion of the beta-2-microglobulin (B2M, or β2m) messenger RNA (mRNA) transcript. B2M is a component of MHC class I complex. In the MHC class I complex, B2M lies beside the α3 domain of the α chain on the cell surface. The α1 domain is directly above B2M oriented in a typical structure diagram of the protein complex, and α1 and B2M lie adjacent to α2 and α3, the latter of which is connected to a transmembrane domain. Without wishing to be bound by theory, it is thought that reduced or eliminated expression or function of B2M interferes with the formation of the MHC class I complex, leading to immune cells with greatly reduced or absent MHC class I on the cell surface.

[0042] The immune cell described herein comprises an inhibitory receptor comprising a binding domain specific to a class I major histocompatibility complex (MHC-I) molecule, or a peptide-MHC complex thereof, wherein expression and/or function of beta-2-microglobulin (B2M) in said immune cell has been reduced or eliminated. In particular embodiments, the immune cells comprise an interfering RNA, comprising a sequence complementary to a sequence of a B2M mRNA. In some embodiments, the interfering RNA is capable of inducing RNA interference (RNAi) mediated degradation of the B2M mRNA. The immune cells described herein, according to some embodiments, comprise a short hairpin RNA. In some embodiments, the shRNA comprises a first sequence and a second sequence, wherein the first sequence, has from 5′ to 3′ a sequence complementary to the B2M mRNA; and wherein the second sequence, has from 5′ to 3′ end a sequence complementary to the first sequence, wherein the first sequence and second sequence form the shRNA. In an immune cell comprising the shRNA, the B2M gene product is reduced or eliminated in expression and/or function. In some embodiments, an immune cell comprising the shRNA is reduced or eliminated in expression or function of an MHC-I molecule.

[0043] In one aspect, the disclosure provides vectors for expressing the shRNA described herein in an immune cell. In another aspect, the disclosure provides methods of manufacturing the immune cells described herein.

[0044] In one aspect, disclosure provides compositions comprising the immune cells described herein.

[0045] In one aspect, the disclosure provides methods of treatment comprising administering the immune cells described herein to a subject in need thereof. In another aspect, the disclosure provides compositions comprising the immune cells described herein for use as a medicament in the treatment of a subject in need. In some embodiments, the subject suffers from or is at risk of cancer or a hematological malignancy.

[0046] The approach disclosed herein uses, in some embodiments, two engineered receptors, the first comprising a ligand binding domain for an activator ligand and the second comprising a ligand binding domain for an inhibitor ligand, which is selectively activated in target cells using an “AND NOT” Boolean logic (FIGS. 2A, 2B, 3A and 3B). Normal cells express both the activator and the inhibitor ligands, but activation of effector cells through the first receptor is blocked by binding of the second receptor comprising the inhibitor LBD to the inhibitor ligand, which exerts a protective effect and dominates the activity of the first, activator receptor. In contrast, in target cells that express the activator ligand but do not express the inhibitor ligand, binding of the activator ligand by the activator LBD leads to activation of the cell. Advantages of the dual activator/inhibitor receptor strategy of the instant disclosure include the ability to tune the activator and inhibitor combination to create a potent, but specific tumor-targeted adoptive cell therapy. Further, this approach can overcome the challenges of a variable effector to target cell ratio (E:T ratio) in the body, and the potentially massive excess of normal versus tumor cells seen when targeting tumor cells with adoptive cell therapies (e.g., 10¹³ normal cells versus 10⁹ tumor cells). Still further, the inventors have identified activators and inhibitors that cover large potential patient combinations, rendering this a commercially feasible approach.

[0047] Specificity of the adoptive cell therapy for a specific cell type can be achieved through the different activities of the first and second receptors, and the differential expression of the first and second ligands for the first and second receptors, respectively. Binding of the first ligand to the first receptor provides an activation signal, while binding of the second ligand to the second receptor prevents or reduces activation of effector cells even in the presence of the first ligand. The first ligand can be expressed more broadly than the second ligand, for example in both cells targeted by an adoptive cell therapy, and in healthy cells that are not target cells for an adoptive cell therapy (non-target cells). In contrast, the second ligand is expressed in the non-target cells, and is not expressed in the target cells. Only the target cells and not the non-target express the first and not the second ligand, thereby activating effector cells comprising the dual receptors of the disclosure in the presence of these cells.

[0048] The disclosure provides compositions and methods for targeting cells (e.g. tumor cells) based on loss of heterozygosity through use of two engineered receptors. The two engineered receptors, one an inhibitor and one activator, each comprise a different ligand binding domain that recognizes a different ligand. Differences in expression of the activator and inhibitory ligands are used to selectively activate effector cells expressing the two receptors when only the first, activator ligand is present. In some embodiments, one of the receptors activates the cell and other receptor inhibits the cell when each binds its cognate ligand. In some embodiments, the receptor comprising the second, inhibitor ligand binding domain dominates signaling so that if a target cell expresses both targets, the result is inhibition of the effector cell. Only when the inhibitory target is absent from the cell, does the first, activator ligand induce activation of the effector cell through the receptor comprising the first, activator ligand binding domain.

[0049] Any widely expressed cell surface molecule, for example a cell adhesion molecule, a cell-cell signaling molecule, an extracellular domain, a molecule involved in chemotaxis, a glycoprotein, a G protein-coupled receptor, a transmembrane, a receptor for a neurotransmitter or a voltage gated ion channel, or a peptide antigen of any of these, can be used as a first, activator ligand. As a further example, the activator ligand can be the transferrin receptor (TFRC). Any cell surface molecule not expressed on the surface of the target cell can be used as a second ligand. In those embodiments where an engineered receptor is used in the adoptive cell therapy to treat cancer, and the target cells are cancer cells, a second, inhibitory ligand may be chosen based on the loss of heterozygosity of the second ligand in cancer cells. Exemplary genes whose expression is frequently lost in cancer cells, for example due to mutations leading to loss of heterozygosity, include HLA class I alleles, minor histocompatibility antigens (MiHAs), and Y chromosome genes. In some embodiments, the HLA class I allele comprises an HLA-A, HLA-B or HLA-C allele. In some embodiments, the HLA class I allele comprises HLA-A*02. In some embodiments, the HLA-A allele comprises HLA-A*01, HLA-A*02, HLA-A*03, or HLA-A*11. In some embodiments, the HLA-B allele comprises HLA-B*07. In some embodiments, the HLA-C allele comprises HLA-C*07.

[0050] The disclosure further provides vectors and polynucleotides encoding the engineered receptors described herein.

[0051] The disclosure further provides methods of making immune cell populations comprising the engineered receptors described herein, and methods of treating disorders using the same.

### Definitions

[0052] Prior to setting forth this disclosure in more detail, it may be helpful to an understanding thereof to provide definitions of certain terms to be used herein.

[0053] Unless defined otherwise, all technical and scientific terms used herein have the same meaning as commonly understood by those of ordinary skill in the art to which the invention belongs. Although any methods and materials similar or equivalent to those described herein can be used in the practice or testing of particular embodiments, preferred embodiments of compositions, methods and materials are described herein. For the purposes of the present disclosure, the following terms are defined below. Additional definitions are set forth throughout this disclosure.

[0054] The articles “a,” “an,” and “the” are used herein to refer to one or to more than one (i.e., to at least one, or to one or more) of the grammatical object of the article. By way of example, “an element” means one element or one or more elements.

[0055] The use of the alternative (e.g., “or”) should be understood to mean either one, both, or any combination thereof of the alternatives.

[0056] The term “and/or” should be understood to mean either one, or both of the alternatives.

[0057] Throughout this specification, unless the context requires otherwise, the words “comprise”, “comprises” and “comprising” will be understood to imply the inclusion of a stated step or element or group of steps or elements but not the exclusion of any other step or element or group of steps or elements. By “consisting of” is meant including, and limited to, whatever follows the phrase “consisting of.” Thus, the phrase “consisting of” indicates that the listed elements are required or mandatory, and that no other elements may be present. By “consisting essentially of” is meant including any elements listed after the phrase, and limited to other elements that do not interfere with or contribute to the activity or action specified in the disclosure for the listed elements. Thus, the phrase “consisting essentially of” indicates that the listed elements are required or mandatory, but that no other elements are present that materially affect the activity or action of the listed elements.

[0058] Reference throughout this specification to “one embodiment,” “an embodiment,” “a particular embodiment,” “a related embodiment,” “a certain embodiment,” “an additional embodiment,” “some embodiments,” or “a further embodiment” or combinations thereof means that a particular feature, structure or characteristic described in connection with the embodiment is included in at least one embodiment. Thus, the appearances of the foregoing phrases in various places throughout this specification are not necessarily all referring to the same embodiment. Furthermore, the particular features, structures, or characteristics may be combined in any suitable manner in one or more embodiments. It is also understood that the positive recitation of a feature in one embodiment, serves as a basis for excluding the feature in a particular embodiment.

[0059] As used herein, the term “about” or “approximately” refers to a quantity, level, value, number, frequency, percentage, dimension, size, amount, weight or length that varies by as much as 15%, 10%, 9%, 8%, 7%, 6%, 5%, 4%, 3%, 2% or 1% to a reference quantity, level, value, number, frequency, percentage, dimension, size, amount, weight or length. In one embodiment, the term “about” or “approximately” refers a range of quantity, level, value, number, frequency, percentage, dimension, size, amount, weight or length ±15%, ±10%, ±9%, ±8%, ±7%, ±6%, ±5%, ±4%, ±3%, ±2%, or ±1% about a reference quantity, level, value, number, frequency, percentage, dimension, size, amount, weight or length.

[0060] As used herein, the term “isolated” means material that is substantially or essentially free from components that normally accompany it in its native state. In particular embodiments, the term “obtained” or “derived” is used synonymously with isolated.

[0061] The terms “subject,” “patient” and “individual” are used interchangeably herein to refer to a vertebrate, preferably a mammal, more preferably a human. Tissues, cells, and their progeny of a biological entity obtained in vivo or cultured in vitro are also encompassed. A “subject,” “patient” or “individual” as used herein, includes any animal that exhibits pain that can be treated with the vectors, compositions, and methods contemplated herein. Suitable subjects (e.g., patients) include laboratory animals (such as mouse, rat, rabbit, or guinea pig), farm animals, and domestic animals or pets (such as a cat or dog). Non-human primates and, preferably, human patients, are included.

[0062] The term “allogeneic” refers to donor tissues or cells that are genetically dissimilar to the recipient receiving the cells or tissues, and which are therefore immunologically incompatible with the recipient. The term “allogeneic” refers to any material derived from a different animal of the same species as the individual to whom the material is introduced. Two or more individuals are said to be allogeneic to one another when the genes at one or more loci are not identical. In some aspects, allogeneic material from individuals of the same species may be sufficiently unlike genetically to interact antigenically. For example, cells of the same species that differ genetically are allogeneic.

[0063] The term “autologous” refers to cells or tissues obtained from the same subject.

[0064] As used herein “treatment” or “treating,” includes any beneficial or desirable effect, and may include even minimal improvement in symptoms. “Treatment” does not necessarily indicate complete eradication or cure of the disease or condition, or associated symptoms thereof.

[0065] As used herein, “prevent,” and similar words such as “prevented,” “preventing” etc., indicate an approach for preventing, inhibiting, or reducing the likelihood of a symptom of disease. It also refers to delaying the onset or recurrence of a disease or condition or delaying the occurrence or recurrence of the symptoms of a disease. As used herein, “prevention” and similar words also includes reducing the intensity, effect, symptoms and/or burden of disease prior to onset or recurrence.

[0066] As used herein, the term “amount” refers to “an amount effective” or “an effective amount” of a virus to achieve a beneficial or desired prophylactic or therapeutic result, including clinical results.

[0067] A “prophylactically effective amount” refers to an amount of a virus effective to achieve the desired prophylactic result. Typically but not necessarily, since a prophylactic dose is used in subjects prior to or at an earlier stage of disease, the prophylactically effective amount is less than the therapeutically effective amount.

[0068] A “therapeutically effective amount” of a virus or cell may vary according to factors such as the disease state, age, sex, and weight of the individual, and the ability of the virus or cell to elicit a desired response in the individual. A therapeutically effective amount is also one in which any toxic or detrimental effects of the virus or cell are outweighed by the therapeutically beneficial effects. The term “therapeutically effective amount” includes an amount that is effective to “treat” a subject (e.g., a patient).

[0069] An “increased” or “enhanced” amount of a physiological response, e.g., electrophysiological activity or cellular activity, is typically a “statistically significant” amount, and may include an increase that is 1.1, 1.2, 1.5, 2, 3, 4, 5, 6, 7, 8, 9, 10, 15, 20, 30 or more times (e.g., 500, 1000 times) (including all integers and decimal points in between and above 1, e.g., 1.5, 1.6, 1.7. 1.8, etc.) the level of activity in an untreated cell.

[0070] A “decrease” or “reduced” amount of a physiological response, e.g., electrophysiological activity or cellular activity, is typically a “statistically significant” amount, and may include an decrease that is 1.1, 1.2, 1.5, 2, 3, 4, 5, 6, 7, 8, 9, 10, 15, 20, 30 or more times (e.g., 500, 1000 times) (including all integers and decimal points in between and above 1, e.g., 1.5, 1.6, 1.7. 1.8, etc.) the level of activity in an untreated cell.

[0071] By “maintain,” or “preserve,” or “maintenance,” or “no change,” or “no substantial change,” or “no substantial decrease” refers generally to a physiological response that is comparable to a response caused by either vehicle, or a control molecule/composition. A comparable response is one that is not significantly different or measurable different from the reference response.

[0072] In general, “sequence identity” or “sequence homology” refers to an exact nucleotide-to-nucleotide or amino acid-to-amino acid correspondence of two polynucleotides or polypeptide sequences, respectively. Typically, techniques for determining sequence identity include determining the nucleotide sequence of a polynucleotide and/or determining the amino acid sequence encoded thereby, and comparing these sequences to a second nucleotide or amino acid sequence. Two or more sequences (polynucleotide or amino acid) can be compared by determining their “percent identity.” The percent identity of two sequences, whether nucleic acid or amino acid sequences, is the number of exact matches between two aligned sequences divided by the length of the shorter sequences and multiplied by 100. Percent identity may also be determined, for example, by comparing sequence information using the advanced BLAST computer program, including version 2.2.9, available from the National Institutes of Health. The BLAST program is based on the alignment method of Karlin and Altschul, Proc. Natl. Acad. Sci. USA 87:2264-2268 (1990) and as discussed in Altschul, et al., J. Mol. Biol. 215:403-410 (1990); Karlin And Altschul, Proc. Natl. Acad. Sci. USA 90:5873-5877 (1993); and Altschul et al., Nucleic Acids Res. 25:3389-3402 (1997). Briefly, the BLAST program defines identity as the number of identical aligned symbols (generally nucleotides or amino acids), divided by the total number of symbols in the shorter of the two sequences. The program may be used to determine percent identity over the entire length of the proteins being compared. Default parameters are provided to optimize searches with short query sequences in, for example, with the blastp program. The program also allows use of an SEG filter to mask-off segments of the query sequences as determined by the SEG program of Wootton and Federhen, Computers and Chemistry 17:149-163 (1993). Ranges of desired degrees of sequence identity are approximately 80% to 100% and integer values therebetween. Typically, the percent identities between a disclosed sequence and a claimed sequence are at least 80%, at least 85%, at least 90%, at least 95%, or at least 98%.

[0073] The term “exogenous” is used herein to refer to any molecule, including nucleic acids, protein or peptides, small molecular compounds, and the like that originate from outside the organism. In contrast, the term “endogenous” refers to any molecule that originates from inside the organism (i.e., naturally produced by the organism).

[0074] The term “MOI” is used herein to refer to multiplicity of infection, which is the ratio of agents (e.g. viral particles) to infection targets (e.g. cells). All publications and patents mentioned herein are hereby incorporated by reference in their entirety as if each individual publication or patent was specifically and individually indicated to be incorporated by reference. In case of conflict, the present application, including any definitions herein, will control. However, mention of any reference, article, publication, patent, patent publication, and patent application cited herein is not, and should not be taken as an acknowledgment, or any form of suggestion, that they constitute valid prior art or form part of the common general knowledge in any country in the world.

[0075] In the present description, any concentration range, percentage range, ratio range, or integer range is to be understood to include the value of any integer within the recited range and, when appropriate, fractions thereof (such as one tenth and one hundredth of an integer), unless otherwise indicated. The term “about”, when immediately preceding a number or numeral, means that the number or numeral ranges plus or minus 10%.

[0076] As used herein, a “target cell” refers to cell that is targeted by an adoptive cell therapy. For example, a target cell can be cancer cell, which can be killed by the transplanted T cells of the adoptive cell therapy. Target cells of the disclosure express an activator ligand as described herein, and do not express an inhibitor ligand.

[0077] As used herein, a “non-target cell” refers to cell that is not targeted by an adoptive cell therapy. For example, in an adoptive cell targeting cancer cells, normal, healthy, non-cancerous cells are non-target cells. Some, or all, non-target cells in a subject may express both the target antigen and the non-target antigen. Non-target cells in a subject may express the non-target antigen irrespective of whether or not these cells also express the target antigen.

[0078] The present description includes artificial receptors with activating and inhibiting activity. The artificial receptors are sometimes referred to as “activator receptors,” “inhibitor receptors,” or “engineered receptors.” Inhibitor receptors are sometimes referred to as “blockers,” “blocking receptors,” and the like.

[0079] “RNAi” or “RNA interference” refers to the process of sequence-specific post-transcriptional gene silencing, mediated by double-stranded RNA (dsRNA). Duplex RNAs such as siRNA (small interfering RNA), miRNA (micro RNA), shRNA (short hairpin RNA), ddRNA (DNA-directed RNA), piRNA (Piwi-interacting RNA), or rasiRNA (repeat associated siRNA) and modified forms thereof are all capable of mediating RNA interference. These dsRNA molecules may be commercially available or may be designed and prepared based on known sequence information. The anti-sense strand of these molecules can include RNA, DNA, PNA, or a combination thereof. DNA/RNA chimeric polynucleotides include, but are not limited to, a double-strand polynucleotide composed of DNA and RNA that inhibits the expression of a target gene. dsRNA molecules can also include one or more modified nucleotides, as described herein, which can be incorporated on either or both strands.

[0080] In RNAi gene silencing or knockdown, dsRNA comprising a first (anti-sense) strand that is complementary to a portion of a target gene and a second (sense) strand that is fully or partially complementary to the first anti-sense strand is introduced into an organism. After introduction into the organism, the target gene-specific dsRNA is processed into relatively small fragments (siRNAs), and can subsequently become distributed throughout the organism and decrease messenger RNA of target gene, leading to a cell phenotype that may come to closely resemble the phenotype arising from a complete or partial deletion of the target gene.

[0081] Certain dsRNAs in cells can undergo the action of Dicer enzyme, a ribonuclease III enzyme. Dicer can process the dsRNA into shorter pieces of dsRNA, i.e. siRNAs. RNAi also involves an endonuclease complex known as the RNA induced silencing complex (RISC). Following cleavage by Dicer, siRNAs enter the RISC complex and direct cleavage of a single stranded RNA target having a sequence complementary to the anti-sense strand of the siRNA duplex. The other strand of the siRNA is the passenger strand. Cleavage of the target RNA takes place in the middle of the region complementary to the anti-sense strand of the siRNA duplex. siRNAs can thus down regulate or knock down gene expression by mediating RNA interference in a sequence-specific manner.

[0082] As used herein, “target gene” or “target sequence” refers to a gene or gene sequence whose corresponding RNA is targeted for degradation through the RNAi pathway using dsRNAs or siRNAs as described herein. To target a gene, for example using an siRNA, the siRNA comprises an anti-sense region complementary to, or substantially complementary to, at least a portion of the target gene or sequence, and sense strand complementary to the anti-sense strand. Once introduced into a cell, the siRNA directs the RISC complex to cleave an RNA comprising a target sequence, thereby degrading the RNA.

[0083] The term “chimeric antigen receptors” or “CARs” as used herein, may refer to artificial T-cell receptors, chimeric T-cell receptors, or chimeric immunoreceptors, for example, and encompass engineered receptors that graft an artificial specificity onto a particular immune effector cell, such as a helper T cell (CD4+), cytotoxic T cell (CD8+) or NK cell. CARs may be employed to impart the specificity of a monoclonal antibody onto a T cell, thereby allowing a large number of specific T cells to be generated, for example, for use in adoptive cell therapy. In specific embodiments, CARs direct specificity of the cell to a tumor associated antigen such as an HLA-E antigen. In some embodiments, CARs comprise an intracellular signaling domain, a transmembrane domain, and an extracellular domain comprising an antigen-binding region. In some embodiments, CARs comprise fusions of single-chain variable fragments (scFvs) or scFabs derived from monoclonal antibodies, fused to a transmembrane domain and intracellular signaling domain(s). The fusion may also comprise a hinge. Either heavy-light (H-L) and light-heavy (L-H) scFvs may be used. The specificity of CAR designs may be derived from antigens of receptors (e.g., peptides). Depending on the type of intracellular domain, a CAR can be an activator receptor or an inhibitory receptor. In some embodiments, for example when the CAR is an activator receptor, the CAR comprises domains for additional co-stimulatory signaling, such as CD3ζ, FcR, CD27, CD28, CD137, DAP10, and/or OX40. In some embodiments, molecules can be co-expressed with the CAR, including co-stimulatory molecules, reporter genes for imaging (e.g., for positron emission tomography), gene products that conditionally ablate the T cells upon addition of a pro-drug, homing receptors, cytokines, and cytokine receptors. As used herein, characteristics attributed to a chimeric antigen receptor may be understood to refer to the receptor itself or to a host cell comprising the receptor.

[0084] As used herein, a “TCR”, sometimes also called a “TCR complex” or “TCR/CD3 complex” refers to a protein complex comprising a TCR alpha chain, a TCR beta chain, and one or more of the invariant CD3 chains (zeta, gamma, delta and epsilon), sometimes referred to as subunits. The TCR alpha and beta chains can be disulfide-linked to function as a heterodimer to bind to peptide-MHC complexes. Once the TCR alpha/beta heterodimer engages peptide-MHC, conformational changes in the TCR complex in the associated invariant CD3 subunits are induced, which leads to their phosphorylation and association with downstream proteins, thereby transducing a primary stimulatory signal. In an exemplary TCR complex, the TCR alpha and TCR beta polypeptides form a heterodimer, CD3 epsilon (CD3E) and CD3 delta (CD3D) form a heterodimer, CD3 epsilon and CD3 gamma (CD3G) for a heterodimer, and two CD3 zeta (CD3Z) form a homodimer.

[0085] The term “stimulation” refers to a primary response induced by binding of a stimulatory domain or stimulatory molecule (e.g., a TCR/CD3 complex) with its cognate antigen thereby mediating a signal transduction event, such as, but not limited to, signal transduction via the TCR/CD3 complex. Stimulation can mediate altered expression of certain molecules, and/or reorganization of cytoskeletal structures, and the like.

[0086] The term “stimulatory molecule” or “stimulatory domain” refers to a molecule or portion thereof that, when natively expressed by a T-cell, provides the primary cytoplasmic signaling sequence(s) that regulate activation of the TCR complex in a stimulatory way for at least some aspect of the T-cell signaling pathway. TCR alpha and/or TCR beta chains of wild type TCR complexes do not contain stimulatory domains and require association with CD3 subunits such as CD3 zeta to initiate signaling. In one aspect, the primary stimulatory signal is initiated by, for instance, binding of a TCR/CD3 complex with a major histocompatibility complex (MHC) bound to peptide, and which leads to mediation of a T-cell response, including, but not limited to, proliferation, activation, differentiation, and the like. One or more stimulatory domains, as described herein, can be fused to the intracellular portion of any one or more subunits of the TCR complex, including TCR alpha, TCR beta, CD3 delta, CD3 gamma and CD3 epsilon.

[0087] As used herein, a “domain capable of providing a stimulatory signal” refers to any domain that, either directly or indirectly, can provide a stimulatory signal that enhances or increases the effectiveness of signaling mediated by the TCR complex to enhance at least some aspect of T-cell signaling. The domain capable of providing a stimulatory signal can provide this signal directly, for example with the domain capable of providing the stimulatory signal is a primary stimulatory domain or co-stimulatory domain. Alternatively, or in addition, the domain capable of providing the stimulatory signal can act indirectly. For example, the domain can be a scaffold that recruits stimulatory proteins to the TCR, or provide an enzymatic activity, such as kinase activity, that acts through downstream targets to provide a stimulatory signal.

[0088] As used herein, “activation” of an immune cell or an immune cell that is “activated” is an immune cell that can carry out one or more functions characteristic of an immune response. These functions include proliferation, release of cytokines, and cytotoxicity, i.e. killing of a target cell. Activated immune cells express markers that will be apparent to persons of skill in the art. For example, activated T cells can express one or more of CD69, CD71, CD25 and HLA-DR. An immune cell expressing an activator receptor (e.g. a HLA-E CAR) can be activated by the activator receptor when it becomes responsive to the binding of the receptor to a target antigen (e.g. HLA-E) expressed by the target cell. A “target antigen” can also be referred to as an “activator antigen” and may be isolated or expressed by a target cell. Activation of an immune cell expressing an inhibitory receptor can be prevented when the inhibitory receptor becomes responsive to the binding of a non-target antigen (e.g. HLA-A*02), even when the activator receptor is bound to the target activator ligand. A “non-target antigen” can also be referred to as an “inhibitory ligand” or a “blocker”, and may be isolated or expressed by a target cell.

[0089] As used herein, a “domain capable of providing an inhibitory signal” refers to any domain that, either directly or indirectly, can provide an inhibitory signal that inhibits or decreases the effectiveness signaling mediated by the TCR complex. The domain capable of providing an inhibitory signal can reduce, or block, totally or partially, at least some aspect of T-cell signaling or function. The domain capable of providing an inhibitory signal can provide this signal directly, for example with the domain capable of providing the inhibitory signal provides a primary inhibitory signal. Alternatively, or in addition, the domain capable of providing the stimulatory signal can act indirectly. For example, the domain can recruit additional inhibitory proteins to the TCR, or can provide an enzymatic activity that acts through downstream targets to provide an inhibitory signal.

[0090] As used herein, “intracellular domain” refers to the cytoplasmic or intracellular domain of a protein, such as a receptor, that interacts with the interior of the cell, and carries out a cytosolic function. As used herein, “cytosolic function” refers to a function of a protein or protein complex that is carried out in the cytosol of a cell. For example, intracellular signal transduction cascades are cytosolic functions.

[0091] A polynucleotide is “operably linked” to another polynucleotide when it is placed into a functional relationship with the other polynucleotide. For example, a promoter or enhancer is operably linked to a coding sequence if it affects the transcription of the sequence. A peptide is “operably linked” to another peptide when the polynucleotides encoding them are operably linked, preferably they are in the same open reading frame.

[0092] A “promoter” is a sequence of DNA needed to turn a gene on or off. Promoters are located immediately upstream and/or overlapping the transcription start site, and are usually between about one hundred to several hundred base pairs in length.

[0093] Polymorphism refers to the presence of two or more variants of a nucleotide sequence in a population. A polymorphism may comprise one or more base changes, an insertion, a repeat, or a deletion. A polymorphism includes e.g. a simple sequence repeat (SSR) and a single nucleotide polymorphism (SNP), which is a variation, occurring when a single nucleotide of adenine (A), thymine (T), cytosine (C) or guanine (G) is altered.

[0094] As used herein, “specific to” or “specifically binds to” when used with respect to a ligand binding domain, such as an antigen binding domain, refers to a ligand binding domain that has a high specificity for a named target. Antibody specificity can viewed as a measure of the goodness of fit between the ligand binding domain and the corresponding ligand, or the ability of the ligand binding domain to discriminate between similar or even dissimilar ligands. In comparison with specificity, affinity is a measure of the strength of the binding between the ligand binding domain and ligand, such that a low-affinity ligand binding domain binds weakly and high-affinity ligand binding domain binds firmly. A ligand binding domain that is specific to a target allele is one that can discriminate between different alleles of a gene. For example, a ligand binding domain that is specific to HLA-A*02 will not bind, or bind more weakly to other HLA-A alleles such as HLA-A*01 or HLA-A*03. The person of skill in the art will appreciate that a ligand binding domain can be said to be specific to a particular target, and yet still have low levels of binding to one or more additional targets that do not affect its function in the receptor systems described herein. In the context of guide nucleic acids (gNA), a gNA with a targeting sequence that is “specific to” a target sequence is capable of binding to the target sequence and localizing the ribonucleoprotein (RNP) comprising the gNA to the target sequence.

[0095] In the present description, any concentration range, percentage range, ratio range, or integer range is to be understood to include the value of any integer within the recited range and, when appropriate, fractions thereof (such as one tenth and one hundredth of an integer), unless otherwise indicated. The term “about”, when immediately preceding a number or numeral, means that the number or numeral ranges plus or minus 10%.

[0096] As used herein, a “target antigen,” whether referred to using the term antigen or the name of a specific antigen, refers to an antigen expressed by a target cell, such as a cancer cell. Expression of target antigen is not limited to target cells. Target antigens may be expressed by both cancer cells and normal, non-cancer cells in a subject.

[0097] As used herein, a “non-target antigen” (or “blocker antigen”) whether referred to using the term antigen or the name of a specific antigen, refers to an antigen that is expressed by normal, non-cancer cells and is not expressed in cancer cells. This difference in expression allows the inhibitory receptor to inhibit immune cell activation in the presence of non-target cells, but not in the presence of target cells.

[0098] As used herein, “affinity” refers to strength of binding of a ligand to a single ligand binding site on a receptor, for example an antigen for the antigen binding domain of any of the receptors described herein. Ligand binding domains can have a weaker interaction (low affinity) with their ligand, or a stronger interaction (high affinity).

[0099] Kd, or dissociation constant, is a type of equilibrium constant that measures the propensity of a larger object to separate reversibly into smaller components, such as, for example, when a macromolecular complex comprising receptor and its cognate ligand separates into the ligand and the receptor. When the Kd is high, it means that a high concentration of ligand is needed to occupy the receptor, and the affinity of the receptor for the ligand is low. Conversely, a low Kd means that the ligand has a high affinity for the receptor.

[0100] As used herein, a receptor that is “responsive” or “responsive to” refers to a receptor comprising an intracellular domain, that when bound by a ligand (i.e. antigen) generates a signal corresponding to the known function of the intracellular domain. An activator receptor bound to a target antigen can generate a signal that causes activation of an immune cell expressing the activator receptor. An inhibitory receptor bound to a non-target antigen can generate an inhibitory signal that prevents or reduces activation of an immune cell expressing the activator receptor. Responsiveness of receptors, and their ability to activate or inhibit immune cells expressing the receptors, can be assayed by any means known in the art and described herein, including, but not limited to, reporter assays and cytotoxicity assays.

[0101] Receptor expression on an immune cell can be verified by assays that report the presence of the activator receptors and inhibitory receptors described herein. For example, a population of immune cells can be stained with a labeled molecule (e.g. a fluorophore labeled receptor-specific antibody or a fluorophore-labeled receptor-specific ligand), and quantified using fluorescence activated cell sorting (FACS) flow cytometry. This method allows a percentage of immune cells in a population of immune cells to be characterized as expressing an activator receptor, an inhibitory receptor, or both receptors. The ratio of activator receptor and inhibitory receptors expressed by the immune cells described herein can be determined by, for example, digital droplet PCR. These approaches can be used to characterize the population of cells for the production and manufacturing of the immune cells, pharmaceutical compositions, and kits described herein. For the immune cells, pharmaceutical compositions, and kits described herein, it is understood that a suitable percentage of immune cells expressing both an activator receptor and an inhibitory receptor is determined specifically for the methods described herein. For example, a suitable percentage of immune cells expressing both an activator receptor and in inhibitory receptor can be at least 50%, at least 55%, at least 60%, at least 65%, at least 70%, at least 75%, at least 80%, at least 85%, at least 90%, or at least 95%. For example, a suitable percentage of immune cells expressing both an activator receptor and an inhibitory receptor can be at most 50%, at most 55%, at most 60%, at most 65%, at most 70%, at most 75%, at most 80%, at most 85%, at most 90%, or at most 95%. For example, a suitable ratio of activator receptor and inhibitory receptor in an immune cell can be about 5:1, about 4:1, about 3:1, about 2:1, about 1:1, about 1:2, about 1:3, about 1:4, or about 1:5. It is understood that purification, enrichment, and/or depletion steps can be used on populations of immune cells to meet suitable values for the immune cells, pharmaceutical compositions, and kits described herein.

[0102] A responsive receptor expressed by the immune cells described herein can be verified by assays that measure the generation of a signal expected to be generated by the intracellular domain of the receptor. Reporter cell lines, such as Jurkat-Luciferase NFAT cells (Jurkat cells), can be used to characterize a responsive receptor. Jurkat cells are derived from T cells and comprise a stably integrated nuclear factor of activated T-cells (NFAT)-inducible luciferase reporter system. NFAT is a family of transcription factors required for immune cell activation, whose activation can be used as a signaling marker for T cell activation. Jurkat cells can be transduced or transfected with the activator receptors and/or inhibitory receptors described herein. The activator receptor is responsive to the binding of a ligand if the Jurkat cell expresses a luciferase reporter gene, and the level of responsiveness can be determined by the level of reporter gene expression. The presence of luciferase can be determined using any known luciferase detection reagent, such as luciferin. An inhibitory receptor is responsive to the binding of a ligand if, when co-expressed with an activator receptor in Jurkat cells, it prevents a normally responsive immune cell from expressing luciferase in response to the activator receptor. For example, the responsiveness of an inhibitory receptor can be determined and quantified in a Jurkat cell expressing both an activator and an inhibitor by observing the following: 1) the Jurkat cell expresses luciferase in the presence of activator receptor ligand and absence of inhibitory receptor ligand; and 2) luciferase expression in the Jurkat cell is reduced or eliminated in the presence of both an activator receptor ligand and an inhibitory receptor ligand. This approach can be used to determine the sensitivity, potency, and selectivity of activator receptors and specific pairs of activator receptors and inhibitory receptors. The sensitivity, potency, and selectivity can be quantified by EC50 or IC50 values using dose-response experiments, where an activator receptor ligand and/or inhibitory receptor ligand is titrated into a culture of Jurkat cells expressing an activator receptor or a specific pair of activator and inhibitory receptors. Alternatively, the EC50 and IC50 values can be determined in a co-culture of immune cells (e.g. Jurkat cells or primary immune cells) expressing an activator receptor or a specific pair of activator and inhibitory receptors and target cells expressing an increasing amount of an activator ligand or inhibitor ligand. An increasing amount of activator ligand or inhibitor ligand can be accomplished in the target cell by, for example, titration of activator ligand or inhibitor ligand encoding mRNA into target cells, or use of target cells that naturally express different levels of the target ligands.

[0103] Activation of the immune cells described herein that express an activator receptor or specific pairs of activator and inhibitory receptors can be further determined by assays that measure the viability of a target cell following co-incubation with said immune cells. The immune cells, sometimes referred to as effector cells, are co-incubated with target cells that express an activator receptor ligand, an inhibitory receptor ligand, or both an activator and inhibitory receptor ligand. Following co-incubation, viability of the target cell is measured using any method to measure viability in a cell culture. For example, viability can be determined using a mitochondrial function assay that uses a tetrazolium salt substrate to measure active mitochondrial enzymes. Viability can also be determined using imaging based methods. Target cells can express a fluorescent protein, such as green fluorescent protein or red fluorescent protein. Reduction in total cell fluorescence indicates a reduction in viability of the target cell. A reduction in viability of the target cell following incubation with immune cells expressing an activator receptor or a specific pair of activator and inhibitory receptors is interpreted as target cell-mediated activation of the immune cell. A measure of the selectivity of the immune cells can also be determined using this approach. The immune cell expressing a pair of activator and inhibitory receptors is selective if the following is observed: 1) viability is reduced in target cells expressing the activator receptor ligand but not the inhibitory receptor ligand; 2) viability is not reduced in target cells expressing both an activator receptor ligand and an inhibitory receptor ligand. From these measurements, a “specific killing” value can be derived that quantifies the percentage of immune cell activation based on the reduction in viability of target cell as a percentage of a negative control (immune cells that do not express an activator receptor). Further, from these measurements a “selectivity ratio” value can be derived that represents the ratio of the specific killing observed in target cells expressing an activator receptor ligand in the absence of inhibitory receptor ligand to the specific killing observed in target cells expressing both an activator receptor ligand and an inhibitory receptor ligand. This approach can be used to characterize the population of cells for the production and manufacturing of the immune cells, pharmaceutical compositions, and kits described herein.

[0104] A suitable specific killing value for the immune cells, pharmaceutical compositions, and kits can be, for example, the following criteria: 1) at least 40%, at least 50%, at least 60%, at least 70%, at least 80%, at least 90%, at least 95%, at least 97% or at least 99% specific killing following a 48 hour co-incubation of immune cells and target cells expressing activator receptor ligand in the absence of inhibitory receptor ligand; and 2) less than or equal to 40%, less than or equal to 35%, less than or equal to 30%, less than or equal to 25%, less than or equal to 20%, less than or equal to 15%, less than or equal to 10%, less than or equal to 5%, less than or equal to 3% or less than or equal to 1% specific killing of target cell expressing both an activator receptor ligand and an inhibitory receptor ligand.

[0105] As a further example, a suitable specific killing value for the immune cells, pharmaceutical compositions and kits can be the following criteria: 1) between 30% and 99%, between 40% and 99%, between 50% and 99%, between 55% and 95%, between 60% and 95%, between 60% and 90%, between 50% and 80%, between 50% and 70% or between 50% and 60% of target cells expressing the activator ligand but not the inhibitor ligand are killed; and 2), between 1% and 40%, between 3% and 40%, between 5% and 40%, between 5% and 30%, between 10% and 30%, between 15% and 30% or between 5% and 20% of target cells expressing the activator ligand and the inhibitor ligand are killed.

[0106] As a still further example, a suitable specific killing value for the immune cells, pharmaceutical compositions, and kits can be, for example, the following criteria: 1) at least 50% specific killing following a 48 hour co-incubation of immune cells and target cells expressing activator receptor ligand in the absence of inhibitory receptor ligand; and 2) less than or equal to 20% specific killing of target cell expressing both an activator receptor ligand and an inhibitory receptor ligand. As a further example, the immune cells are capable of killing at least 30%, at least 40%, at least 50%, at least 60%, at least 70%, at least 80%, at least 90%, at least 95%, at least 97% or at least 99% of target cells expressing the activator ligand and not the inhibitor ligand over a period of 6 hours, 12 hours, 18 hours, 24 hours, 30 hours, 36 hours, 42 hours, 48 hours, 54 hours, or 60 hours, while killing less than 40%, less than 30%, less than 20%, less than 10%, less than 5%, less than 3% or less than 1% of target cells expressing the activator and inhibitor ligands over the same time period.

[0107] A suitable specific killing value of the target cell expressing an activator ligand in the absence of an inhibitory ligand value for the immune cells, pharmaceutical compositions, and kits can be, for example, at least about 50% to at least about 95%. A suitable specific killing value of the target cell expressing an activator ligand in the absence of an inhibitory ligand value for the immune cells, pharmaceutical compositions, and kits can be, for example, at least about 50%, at least about 55%, at least about 60%, at least about 65%, at least about 70%, at least about 75%, at least about 80%, at least about 85%, at least about 90%, or at least about 95%. A suitable specific killing value of the target cell expressing an activator ligand in the absence of an inhibitory ligand value for the immune cells, pharmaceutical compositions, and kits can be, for example, at most about 50%, at most about 55%, at most about 60%, at most about 65%, at most about 70%, at most about 75%, at most about 80%, at most about 85%, at most about 90%, or at most about 95%. A suitable specific killing value of target cells expressing both an activator receptor ligand and an inhibitory receptor ligand for the immune cells, pharmaceutical compositions, and kits can be less than about 50%, less than about 45%, less than about 40%, less than about 35%, less than about 30%, less than about 25%, less than about 20%, less than about 15%, less than about 10%, or less than about 5%. The suitable specific killing value for the immune cells, pharmaceutical compositions, and kits can be determined following about 6 hours, about 12 hours, about 18 hours, about 24, about 30 hours, about 36 hours, about 42 hours, about 48 hours, about 54 hours, about 60 hours, about 66 hours, or about 72 hours of co-incubation of immune cells with target cells.

[0108] A suitable specific killing value of the target cell expressing an activator ligand in the absence of an inhibitory ligand value for the immune cells, pharmaceutical compositions, and kits can be, for example, at least about 50% to at least about 95%. A suitable specific killing value of the target cell expressing an activator ligand in the absence of an inhibitory ligand value for the immune cells, pharmaceutical compositions, and kits can be, for example, at least about 50%, at least about 55%, at least about 60%, at least about 65%, at least about 70%, at least about 75%, at least about 80%, at least about 85%, at least about 90%, or at least about 95%. A suitable specific killing value of the target cell expressing an activator ligand in the absence of an inhibitory ligand value for the immune cells, pharmaceutical compositions, and kits can be, for example, at most about 50%, at most about 55%, at most about 60%, at most about 65%, at most about 70%, at most about 75%, at most about 80%, at most about 85%, at most about 90%, or at most about 95%. A suitable specific killing value of target cells expressing both an activator receptor ligand and an inhibitory receptor ligand for the immune cells, pharmaceutical compositions, and kits can be less than about 50%, less than about 45%, less than about 40%, less than about 35%, less than about 30%, less than about 25%, less than about 20%, less than about 15%, less than about 10%, or less than about 5%. The suitable specific killing value for the immune cells, pharmaceutical compositions, and kits can be determined following about 6 hours, about 12 hours, about 18 hours, about 24, about 30 hours, about 36 hours, about 42 hours, about 48 hours, about 54 hours, about 60 hours, about 66 hours, or about 72 hours of co-incubation of immune cells with target cells.

[0109] As used herein, the term “functional variant” refers to a protein that has one or more amino-acid substitutions, insertions, or deletions as compared to a parental protein, and which retains one or more desired activities of the parental protein. A functional variant may be a fragment of the protein (i.e. a variant having N- and/or C-terminal deletions) that retain the one or more desired activities of the parental protein.

[0110] All publications and patents mentioned herein are hereby incorporated by reference in their entirety as if each individual publication or patent was specifically and individually indicated to be incorporated by reference. In case of conflict, the present application, including any definitions herein, will control. However, mention of any reference, article, publication, patent, patent publication, and patent application cited herein is not, and should not be taken as an acknowledgment, or any form of suggestion, that they constitute valid prior art or form part of the common general knowledge in any country in the world.

### Allogeneic Immune Cells

[0111] The disclosure provides genetically engineered allogeneic immune cells for use in adoptive cell therapies. The allogeneic immune cells described herein can be modified using any strategies known in the art such as, and without limitation, gene editing to generate targeted gene knockdowns, knockouts, disruptions, insertions, deletions, frameshift mutations, mis-sense mutations, nonsense mutations or substitutions in a target gene, expression of RNAs such as for RNA interference, or expression of protein products which can disrupt gene function. Any technique known in the art that can be used to modify cells to impact on the expression of a target gene or the function of a target gene product is envisaged as within the scope of the instant methods. Genetic engineering strategies include use of gene editing technologies known in the art such as, without limitation, RNA interference (RNAi), Clustered Regularly Interspaced Short Palindromic Repeats (CRISPR)/Cas, transcription activator-like effector nuclease (TALEN), zinc finger nucleases (ZFN), or any technology used to achieve the goals of genetic editing allogeneic immune cells described herein. Genes targeted for editing in the allogeneic immune cells of the disclosure include TCRα, TCRβ, CD52, B2M, CD3, and/or human leukocyte antigen (HLA), such as HLA-A, HLA-B and/or HLA-C. The allogeneic immune cells of the disclosure can be engineered to modify a target locus leading to disruption of a target gene, or to express a construct, such as an RNAi or protein construct, that disrupts that the target gene or its gene product in trans.

[0112] Allogeneic therapeutic cells can serve as pre-manufactured cells, characterized in detail and available for immediate administration to patients in adoptive cell therapy. By allogeneic it is meant that the cells are obtained from individuals belonging to the same species but are genetically dissimilar. However, the use of allogeneic cells presently has many drawbacks. In immune-competent hosts allogeneic cells are rapidly rejected, a process termed host versus graft rejection (HvGD), and this substantially limits the efficacy of the transferred cells. In immune-incompetent hosts, allogeneic cells are able to engraft, but their endogenous TCR specificities recognize the host tissue as foreign, resulting in graft versus host disease (GvHD), which can lead to serious tissue damage and death. In order to effectively use allogeneic cells, both of these problems must be overcome. One strategy used to overcome these problems is targeted disruption of one or more genes encoding TCR subunits in allogeneic therapeutic cells for adoptive cell therapy. Additional strategies include targeted disruption of one or more genes encoding components of the major histocompatibility complex class I (MHC class I) such as HLA-A, HLA-B, HLA-C or beta-2-microglobulin (B2M), and knockout of CD52 in the allogeneic cells to facilitate lymphodepletion of host cells. In a further strategy, the presence of the inhibitory receptor described herein reduces the graft versus host effect, such that allogeneic cells can be employed in which the endogenous TCR receptor subunits are intact.

[0113] In some embodiments, the allogeneic immune cells are T cells. In some embodiments, the allogeneic T cells are cytotoxic T cells.

[0114] In some embodiments, the allogeneic immune cells express an endogenous TCR receptor. For example, the allogeneic immune cells express endogenous TCR gene products capable of reconstituting an endogenous TCR receptor. The present inventors have discovered that expressing an inhibitory receptor, as described herein, can inhibit the function of endogenous TCR receptors expressed by allogeneic immune cells. This approach allows for the expression of a TCR gene or gene product in allogeneic immune cells used for adoptive gene therapy. Avoiding the need to eliminate donor grafted T cell expression of endogenous TCRs is an advantage over allogeneic adoptive cell therapy methods known in the art, which generally require deletion or inhibition of endogenous TCRs.

[0115] In some embodiments, the allogeneic immune cells comprise an activator receptor, an inhibitory receptor, and an endogenous TCR (i.e., the allogeneic immune cells have not been modified to reduce or eliminate expression of one or more TCR subunits). In some embodiments, expression of an inhibitory receptor as described herein reduces GvHD. In some embodiments, expression of an inhibitory receptor by the allogeneic immune cells, for example an inhibitory receptor that targets HLA-A*02, reduces or eliminates GvHD.

[0116] In some embodiments, the allogeneic immune cells are modified to knock down, or knock out, one or more subunits of the endogenous TCR receptor by any of the methods described herein.

[0117] In immunocompetent hosts, allogeneic cells are rapidly rejected by the host immune system. For example, it has been demonstrated that allogeneic leukocytes present in non-irradiated blood products will persist for no more than 5 to 6 days. Thus, to prevent rejection of allogeneic cells, the host's immune system must be effectively suppressed. Glucocorticoidsteroids are widely used therapeutically for immunosuppression. This class of steroid hormones binds to the glucocorticoid receptor (GR) present in the cytosol of T cells resulting in the translocation into the nucleus and the binding of specific DNA motifs that regulate the expression of a number of genes involved in the immunologic process. Treatment of T cells with glucocorticoid steroids results in reduced levels of cytokine production leading to T cell anergy and interfering in T cell activation. Alemtuzumab, also known as CAMPATH1-H, is a humanized monoclonal antibody targeting CD52, a 12 amino acid glycosylphosphatidyl-inositol-(GPI) linked glycoprotein. CD52 is expressed at high levels on T and B lymphocytes and lower levels on monocytes while being absent on granulocytes and bone marrow precursors. Treatment with Alemtuzumab, a humanized monoclonal antibody directed against CD52, has been shown to induce a rapid depletion of circulating lymphocytes and monocytes. It is frequently used in the treatment of T cell lymphomas and in certain cases as part of a conditioning regimen for transplantation. However, in the case of adoptive immunotherapy, the use of immunosuppressive drugs will also have a detrimental effect on the introduced therapeutic T cells. Therefore, to effectively use an adoptive immunotherapy approach in these conditions, the introduced cells would need to be resistant to the immunosuppressive treatment.

[0118] Accordingly, the disclosure provides allogeneic immune cells that have been engineered to be resistant to targeted therapies specific to CD52, such as Alemtuzumab. Allogeneic immune cells can be engineered to be resistant to CD52 targeting therapies by knocking down, or knocking out, CD52 in the allogeneic immune cells using any of the methods described herein.

[0119] Modified T cells that lack expression of a target gene can be obtained by any suitable means, including a knock out or knock down of one or more subunit of a target gene. For example, the T cell can include a knock down of a target gene using siRNA, shRNA, clustered regularly interspaced short palindromic repeats (CRISPR), transcription-activator like effector nuclease (TALEN), or zinc finger endonuclease (ZFN).

[0120] The disclosure provides genetically engineered allogeneic immune cells. In some embodiments, the allogeneic immune cells are allogeneic T cells. In some embodiments, the allogeneic T cells described herein are genetically modified to express an activator receptor and an inhibitory receptor. In some embodiments, the allogeneic T cells described herein comprise additional genetic modifications. In some embodiments, the allogeneic T cells comprise reduced or eliminated expression of the gene encoding TCRα (e.g. T cell receptor alpha constant region, or TRAC). In some embodiments, the allogeneic T cells comprise reduced or eliminated expression or function of the gene encoding TCRβ (e.g. T cell receptor beta locus, or TRB). In some embodiments, the allogeneic T cells comprise reduced or eliminated expression or function of a gene encoding a CD3 subunit of a TCR (e.g., CD3D, CD3E, CD3G or CD3Z). In some embodiments, the allogeneic T cells described herein are genetically modified to contain a natural killer (NK) cell inhibitor component. The activator component can be, for example, an engineered receptor comprising a ligand binding domain that binds to an activator ligand, as described herein. The blocker component can be, for example, an engineered receptor comprising a second ligand binding domain that binds to an inhibitor ligand, as described herein. The NK cell inhibitor component can be, for example, human leukocyte antigen E (HLA-E), human leukocyte antigen G (HLA-G) or killer cell lectin like receptor C1 (KLRC1 or NKG2A) expression.

[0121] In some embodiments, the allogeneic immune cells described herein are genetically modified to reduce or eliminate expression of function of CD52.

[0122] In immune-incompetent hosts, allogeneic cells are able to engraft, but their endogenous TCR specificities recognize the host tissue as foreign, resulting in graft versus host disease (GvHD), which can lead to serious tissue damage and death. In some embodiments, the genetically engineered allogeneic immune cells comprise genetic edits to reduce or eliminate graft versus host disease (GvHD). In some embodiments, the genetically engineered allogeneic T cells comprise genetic edits to make TRAC gene (i.e., a gene encoding TCR alpha) to reduce or eliminate GvHD. In some embodiments, the genetically engineered allogeneic T cells comprise genetic edits to delete the TRB gene to reduce or eliminate GvHD. In some embodiments, the genetically engineered allogeneic immune cells comprise genetic edits to delete the gene encoding one or more CD3 T cell receptor subunits to reduce to eliminate GvHD.

[0123] In immune-competent hosts, allogeneic cells can rapidly be rejected, a process termed host versus graft rejection (HvGD), and this substantially limits the efficacy of the transferred cells. In some embodiments, the genetically engineered allogeneic T cells comprise genetic edits to reduce or eliminate host versus graft disease (HvGD) by reducing or eliminating one or more MHC class one components, and/or expressing an NK cell inhibitor such as HLA-E, HLA-G or NKG2A. In some embodiments, the genetically engineered allogeneic T cells comprise genetic edits to delete the B2M gene to reduce or eliminate HvGD. In some embodiments, expression of a B2M-targeting scFv reduces or eliminates HvGD.

[0124] In some embodiments, the genetically engineered allogeneic T cells comprise genetic edits to reduce or eliminate expression of the CD52 gene.

[0125] In some embodiments, the allogeneic immune cell comprises one or more modifications that reduce immune cell exhaustion, for example T cell exhaustion. As used herein, “T cell exhaustion” refers to the response of T cells to chronic antigen stimulation. Exhaustion is characterized by a step-wise and progressive loss of T cell function, and can culminate in physical elimination of the T cells. Exhaustion is regulated by a variety of inhibitory molecules such as immune checkpoint regulators, and, without wishing to be bound by theory, it is thought that by modifying expression of these molecules by the allogeneic immune cells, exhaustion of these cells can be ameliorated.

[0126] In some embodiments, the allogeneic immune cell can be a cell which does not express, or expresses at low levels, an inhibitory molecule that prevents T cell exhaustion. The allogeneic immune cell can be modified by any method described herein or known in the art. For example, the cell can be a cell that does not express, or expresses at low levels, an inhibitory molecule that can decrease the ability of the allogeneic immune cell to mount an immune effector response. Examples of inhibitory molecules include PD1, PD-L1, CTLA4, TIM3, CEACAM (e.g., CEACAM-1, CEACAM-3 and/or CEACAM-5), LAG3, VISTA, BTLA, TIGIT, LAIR1, CD160, 2B4 and TGFR beta. Modification of the allogeneic immune cell, e.g., by modification at DNA, RNA or protein level by any of the methods described herein, can optimize allogeneic immune cell performance. In some embodiments, an inhibitory nucleic acid, e.g., a dsRNA, siRNA or shRNA can be used. In some embodiments, the allogeneic immune cell can be modified using any of the methods described herein to mutate (full or partial deletion, substitution, insertion, frameshift mutation and the like) the locus encoding the inhibitory molecule.

[0127] Allogeneic immune cells, for example those that do not express a functional MHC class I complex, may also be targeted by host NK cells. Killing of allogeneic immune cells by host NK cells can reduce the survival, and therefore the efficacy, of the transplanted cells. One approach to mitigate NK cell mediated killing of transplanted allogeneic cells is through expression of a B2M-HLA fusion protein, for example B2M-HLA-E or B2M-HLA-G fusion proteins, by the transplanted cells. Exemplary fusion proteins that can protect allogeneic T cells from NK-cell mediated lysis are described in Guo et al., European Journal of Immunology (2021) 51: 2513-2521, the contents of which are incorporated by reference herein.

[0128] Accordingly, the disclosure provides a fusion protein comprising B2M protein fused to an HLA protein. In some embodiments, the HLA protein comprises HLA-E. In some embodiments, the HLA protein comprises HLA-G. In some embodiments, the B2M protein and HLA protein are separated by a linker, for example a glycine-serine linker as described herein. In some embodiments, the fusion protein further comprises a peptide, for example a peptide of 3-30 amino acids, 5-25, 5-20 or 5-15 amino acids. In some embodiments, the peptide is linked to B2M by a linker, such as a glycine-serine linker as described herein. Exemplary arrangements include, from N to C terminus, peptide-linker-B2M-linker-HLA-E, B2M-linker-HLA-E, peptide-linker-B2M-linker-HLA-G, and B2M-linker-HLA-G.

[0129] In some embodiments, the B2M and HLA portions of the fusion protein form a complex on the surface of an allogeneic immune cell. In some embodiments, the peptide, B2M and HLA portions of the fusion protein form a complex on the surface of an allogeneic immune cell.

[0130] The disclosure further provides immune cells comprising the B2M-HLA fusion proteins described herein, and vectors encoding the B2M-HLA fusion proteins described herein. In some embodiments, the vector comprises a promoter operably linked to the fusion protein, for example a constitutive promoter.

[0131] The skilled artisan will be able to select a suitable fusion protein based on genotype of the donor cells with respect to HLA, and the particular blocker receptor expressed by the allogeneic cells.

### Gene Targets

[0132] In some embodiments, the immune cells have reduced or eliminated expression or function of a target gene. Exemplary target genes are described below.

### MHC Class I Genes and Polypeptides

[0133] In some embodiments, the genetically engineered immune cells described herein are modified to reduce or eliminate expression of the B2M gene. The beta-2 microglobulin (B2M) gene encodes a protein that associates with the major histocompatibility complex (MHC) class I, i.e. MHC-I complex. The MHC-I complex is required for presentation of antigens on the cell surface. The HLA-A, HLA-B and HLA-C genes that form part of MHC I are highly polymorphic, and when expressed on the surface of cells used in adoptive cell therapy can present as “non-self” and facilitate host rejection (HvGD). The MHC-I complex is disrupted and non-functional when the B2Mis deleted (Wang D et al. Stem Cells Transl Med. 4:1234-1245 (2015)). Furthermore, the B2M gene can be disrupted with high efficiency using gene editing techniques known in the art (Ren et al. Clin. Cancer Res. 23:2255-2266 (2017)). Reducing or eliminating B2M can reduce, or eliminate, functional MHC I on the surface of the immune cell.

[0134] The major histocompatibility complex (MHC) is a locus on the vertebrate genome that encodes a set of polypeptides required for the adaptive immune system. Among these are MHC class I polypeptides that include HLA-A, HLA-B, and HLA-C and alleles thereof. MHC class I alleles are highly polymorphic and expressed in all nucleated cells. MHC class I polypeptides encoded by HLA-A, HLA-B, and HLA-C and alleles thereof form heterodimers with (32 microglobulin (B2M) and present in complex with antigens on the surface of cells.

### CD52 Gene

[0135] In some embodiments, the genetically engineered allogeneic immune cells described herein are modified to reduce or eliminate expression or function of the CD52 gene. CD52 is a 12 amino acid glycosylphosphatidyl-inositol- (GPI) linked glycoprotein (Waldmann and Hale 2005). CD52 is expressed at high levels on T and B lymphocytes and lower levels on monocytes while being absent on granulocytes and bone marrow precursors. Alemtuzumab, also known as CAMPATH1-H, is a humanized monoclonal antibody targeting CD52. Treatment with Alemtuzumab, a humanized monoclonal antibody directed against CD52, has been shown to induce a rapid depletion of circulating lymphocytes and monocytes. It is frequently used in the treatment of T cell lymphomas and in certain cases as part of a conditioning regimen for transplantation and adoptive cell therapies. In the case of adoptive immunotherapy, the use of immunosuppressive drugs will also have a detrimental effect on the introduced therapeutic allogeneic immune cells. Therefore, to effectively use an adoptive immunotherapy approach in these conditions, the introduced cells, e.g. allogeneic immune cells, need to be resistant to the immunosuppressive treatment. Resistance to alemtuzumab-based lymphodepletion or conditioning can be achieved by reducing or eliminating CD52 expression in the allogeneic cells administered to the subject.

### TCR Subunits

[0136] In some embodiments, the genetically engineered allogeneic immune cells described herein comprise genetic edits to reduce or eliminate expression of the TCRα gene (TRAC). In some embodiments, the genetically engineered allogeneic immune cells described herein comprise genetic edits to reduce or eliminate expression of the TCRβ gene (TRB). T cell receptors (TCR) are cell surface receptors that participate in the activation of T cells in response to the presentation of antigen. The TCR includes two protein chains, alpha (TCRα) and beta (TCRβ), which assemble to form a heterodimer and associates with the CD3-transducing subunits to form the T-cell receptor complex present on the cell surface. Each alpha and beta chain of the TCR consists of an immunoglobulin-like N-terminal variable (V) and constant (C) region, a hydrophobic transmembrane domain, and a short cytoplasmic region. As for immunoglobulin molecules, the variable region of the alpha and beta chains are generated by V(D)J recombination, creating a large diversity of antigen specificities within the population of T cells. However, in contrast to immunoglobulins that recognize intact antigen, T cells are activated by processed peptide fragments in association with an MHC molecule, introducing an extra dimension to antigen recognition by T cells, known as MHC restriction. Recognition of MHC disparities between the donor and recipient through the T cell receptor leads to T cell proliferation and the potential development of GvHD. Normal surface expression of the TCR depends on the coordinated synthesis and assembly of all seven components of the complex. The disruption of TCRα and/or beta TCRβ can result in the elimination of the TCR from the surface of T cells, thereby preventing recognition of alloantigen and thus GvHD.

[0137] In some embodiments, the genetically engineered allogeneic immune cells described herein are modified to reduce or eliminate expression of a CD3 gene (CD3D, CD3E, CD3G and/or CD3Z). The CD3 genes form part of the TCR complex, and are required for activation of TCR. CD3 genes as referred to herein comprise the genes encoding the CD3γ, CD3δ, CD3ε, and CD3ζ proteins. The CD3 complex makes up the signaling component of an activated TCR complex, resulting in T cell expansion/proliferation, upregulation of activation markers on the T cell surface, and induction of cytotoxicity or cytokine secretion. Native T cell signaling in allogeneic immune cells can recognize normal host tissue as foreign, and thus result in GvHD. Targeted reduction or elimination of native CD3 genes in allogeneic immune cells can eliminate native T cell signaling and thus reduce or eliminate GvHD.

### Target Gene Sequences

[0138] The disclosure provides an immune cell comprising an inhibitory receptor comprising a ligand binding domain specific to a class I major histocompatibility complex (WIC-I) molecule, or a peptide-WIC complex thereof; wherein expression and/or function of beta-2-microgloobulin (B2M) in said immune cell has been reduced or eliminated. In some embodiments, the immune cell comprises an interfering RNA, comprising a sequence complementary an RNA sequence transcribed from the B2M gene.

[0139] In some embodiments, the target gene is the B2M gene. In some embodiments, the interfering RNA is complementary to at least a portion of a B2M mRNA. In some embodiments, the interfering RNA is complementary to a portion of a B2M mRNA that comprises a coding sequence. In some embodiments, the B2M mRNA sequence comprises an untranslated region.

[0140] Interfering RNAs of the disclosure target and bind to a target sequence through base pair complementarity. The interfering RNA has a complementary sequence to any region of a target gene that is transcribed into RNA. In some embodiments, the target gene is B2M. Transcribed RNA can include intronic regions (introns), expressed regions (exons), untranslated regions (UTRs), coding sequences (CDS), or any other region of the target gene that undergoes transcription. Transcribed RNA can include primary transcripts, pre-mRNA, mature mRNA, and/or mRNA splice variants. RNA can include regulatory signals, such as polyA sites or polyA signal sequences. Transcribed RNA can include any non-coding region of the target gene that is not transcribed as part of an mRNA transcript, e.g. long noncoding RNA (1nRNA) or micro RNA (miRNA). Any transcribed region of the target gene may be targeted for the purpose of reducing or eliminating expression of the target gene in the immune cells described herein. Delivery of interfering RNA can be accomplished using any method known in the art to target gene transcripts that results in altered, disrupted, reduced, or eliminated expression or function the target gene or gene product.

[0141] In some embodiments, the target gene is the B2M gene. In some embodiments, the interfering RNA is complementary to at least a portion of a B2M mRNA. In some embodiments, the B2M RNA comprises a coding sequence. In some embodiments, the B2M mRNA sequence comprises an untranslated region.

[0142] Gene sequences for B2M and transcribed RNA will be known to persons of ordinary skill in the art. The B2M gene sequences and transcribed regions can be found at public databases, such as NCBI GenBank or the NCBI nucleotide database. Sequences may be found using gene identifiers, for example, the B2M gene has NCBI Gene ID: 567 and NCBI Reference Sequence: NC_000015.10. Gene sequences may also be found by searching public databases using keywords. For example, B2M may be found in the NCBI nucleotide database by searching keywords, “B2M” or “beta-2-microglobulin.” Gene sequences include sequence elements such as, but not limited to, exons, coding sequences (CDS), introns, pre-cursor RNAs, mRNAs, and the like. Table 1 provides non-limiting illustrative sequences for B2M gene sequences and transcribed RNA sequences, of which the RNA sequences can be targeted for degradation by interfering RNAs as described herein.

TABLE 1
Illustrative Target B2M Gene Sequences

| Target Gene or Sequence | SEQ ID NO | Identifier |
|---|---|---|
| B2M Gene | 5020 | GenBank: 567 |
| B2M CDS | 5021 | GenBank: AY187687 |
| B2M mRNA | 5029 | NCBI Ref: NM_004048 |

siRNA, miRNA, and shRNA to Inhibit Expression of a Target Protein

[0143] In some embodiments, expression of a target protein can be inhibited using an interfering RNA (RNA interference, or RNAi). In some embodiments, the interfering RNA is short interfering RNA (siRNA), microRNA (miRNA), or short hairpin RNA (shRNA) that targets a nucleic acid encoding the target protein in an allogeneic immune cell described herein. Expression of siRNA, miRNAs, and shRNAs in an allogeneic immune cell can be achieved using any expression system known in the art, e.g., a lentiviral expression system.

[0144] RNA interference (RNAi) is a process by which double-stranded RNA (dsRNA) is used to silence gene expression. While not wanting to be bound by theory, RNAi begins with the cleavage of longer dsRNAs into small interfering RNAs (siRNAs) by an RNaselll-like enzyme, dicer. SiRNAs are dsRNAs that are usually about 19 to 28 nucleotides, or 20 to 25 nucleotides, or 21 to 22 nucleotides in length and often contain 2-nucleotide 3′ overhangs, and 5′ phosphate and 3′ hydroxyl termini. One strand of the siRNA is incorporated into a ribonucleoprotein complex known as the RNA-induced silencing complex (RISC). RISC uses this siRNA strand to identify mRNA molecules that are at least partially complementary to the incorporated siRNA strand, and then cleaves these target mRNAs or inhibits their translation. Therefore, the siRNA strand that is incorporated into RISC is known as the guide strand or the antisense strand. The other siRNA strand, known as the passenger strand or the sense strand, is eliminated from the siRNA and is at least partially homologous to the target mRNA. Those of skill in the art will recognize that, in principle, either strand of an siRNA can be incorporated into RISC and function as a guide strand. However, siRNA design (e.g., decreased siRNA duplex stability at the 5′ end of the antisense strand) can favor incorporation of the antisense strand into RISC.

[0145] RISC-mediated cleavage of mRNAs having a sequence at least partially complementary to the guide strand leads to a decrease in the steady state level of that mRNA and of the corresponding protein encoded by this mRNA. Alternatively, RISC can also decrease expression of the corresponding protein via translational repression without cleavage of the target mRNA. Other RNA molecules and RNA-like molecules can also interact with RISC and silence gene expression. Examples of other RNA molecules that can interact with RISC include short hairpin RNAs (shRNAs), single-stranded siRNAs, microRNAs (miRNAs), and dicer-substrate 27-mer duplexes. The term “siRNA” as used herein refers to a double-stranded interfering RNA unless otherwise noted. Examples of RNA-like molecules that can interact with RISC include RNA molecules containing one or more chemically modified nucleotides, one or more deoxyribonucleotides, and/or one or more non-phosphodiester linkages. For purposes of the present discussion, all RNA or RNA-like molecules that can interact with RISC and participate in RISC-mediated changes in gene expression will be referred to as “interfering RNAs.” SiRNAs, shRNAs, miRNAs, and dicer-substrate 27-mer duplexes are, therefore, subsets of “interfering RNAs.”

[0146] Interfering RNA of embodiments of the invention appear to act in a catalytic manner for cleavage of target mRNA, i.e., interfering RNA is able to effect inhibition of target mRNA in substoichiometric amounts. As compared to antisense therapies, significantly less interfering RNA is required to provide a therapeutic effect under such cleavage conditions.

[0147] Interfering RNAs can be designed for a target gene using methods known in the art. In embodiments of the present invention, interfering RNA target sequences (e.g., siRNA target sequences) within a target mRNA sequence are selected using available design tools. Techniques for selecting target sequences for siRNAs are provided by Tuschl, T. et al., “The siRNA User Guide.” revised May 6, 2004, available on the Rockefeller University web site; by Technical Bulletin #506, “siRNA Design Guidelines.” Ambion Inc. at Ambion's web site; and by other web-based design tools at, for example, the Invitrogen, Dharmacon, Integrated DNA Technologies, Genscript, or Proligo web sites. Initial search parameters can include G/C contents between 35% and 55% and siRNA lengths between 18 and 27 nucleotides. The target sequence may be located in the coding region or in the 5′ or 3′ untranslated regions of the mRNA.

[0148] Interfering RNAs are delivered to the cell using a construct made using methods known in the art. Constructs are commonly made by synthesizing the interfering RNA, annealing, and ligating two complementary oligonucleotides into an expression vector. Another known method uses PCR, whereby a promoter sequence serves as a template and the interfering sequence is contained in the reverse primer, and PCR results in an amplified cloning cassette comprising both promoter and interfering RNA. The amplified cassette is purified from truncated oligos by polyacrylamide gel electrophoresis prior to delivery to the cell. Another approach an interfering RNA template formed from two long partially complementary oligos of approximately equal length, overlapping at their 3′ ends. Each oligo serves as both template (for extending the opposite oligo) and primer (to copy the opposite oligo). Extension and repeated cycling generates a double-stranded product, akin to that generated in the annealed oligo method. The product can be further amplified by PCR with addition of another short primer binding the extended strand. Other methods for making and preparing interfering RNA constructs for cellular delivery and expression are known in the art (Timmons L. Methods Mol Biol. 351:109-117 (2006); Paul C et al. Nature Biotechnology. 20:505-508 (2002); Gupta S et al. PNAS 7:1927-1932 (2004)).

[0149] Exemplary shRNAs that downregulate expression of a target gene, such as components of the TCR are described, e.g., in US Publication No.: 2012/0321667. Exemplary siRNA and shRNA that downregulate expression of a target gene, as described herein, are described, e.g., in U.S. publication No.: US 2007/0036773.

### Illustrative Interfering RNAs

[0150] The disclosure provides interfering RNAs. The double stranded RNA molecule of the invention may be in the form of any type of RNA interference molecule known in the art. In some embodiments, the double stranded RNA molecule is a small interfering RNA (siRNA). In other embodiments, the double stranded RNA molecule is a short hairpin RNA (shRNA) molecule. In other embodiments, the double stranded RNA molecule is a Dicer substrate that is processed in a cell to produce an siRNA. In other embodiments the double stranded RNA molecule is part of a microRNA precursor molecule.

[0151] In some embodiments, the shRNA is a length to be suitable as a Dicer substrate, which can be processed to produce a RISC active siRNA molecule. See, e.g., Rossi et al., US2005/0244858.

[0152] A Dicer substrate double stranded RNA (e.g. a shRNA) can be of a length sufficient that it is processed by Dicer to produce an active siRNA, and may further include one or more of the following properties: (i) the Dicer substrate shRNA can be asymmetric, for example, having a 3′ overhang on the anti-sense strand, (ii) the Dicer substrate shRNA can have a modified 3′ end on the sense strand to direct orientation of Dicer binding and processing of the dsRNA to an active siRNA, for example the incorporation of one or more DNA nucleotides, and (iii) the first and second strands of the Dicer substrate ds RNA can be from 21-30 bp in length.

[0153] shRNAs of the disclosure may be generated exogenously by chemical synthesis, by in vitro transcription, or by cleavage of longer double-stranded RNA with Dicer or another appropriate nuclease with similar activity. Chemically synthesized siRNAs, produced from protected ribonucleoside phosphoramidites using a conventional DNA/RNA synthesizer, may be obtained from commercial suppliers such as Millipore Sigma (Houston, Tex.), Ambion Inc. (Austin, Tex.). Invitrogen (Carlsbad, Calif.), or Dharmacon (Lafayette, Colo.). siRNAs can be purified by extraction with a solvent or resin, precipitation, electrophoresis, chromatography, or a combination thereof, for example. Alternatively, siRNAs may be used with little if any purification to avoid losses due to sample processing.

[0154] In some embodiments, shRNAs of the disclosure can be produced using an expression vector into which a nucleic acid encoding the double stranded RNA has been cloned, for example under control of a suitable promoter.

[0155] In some embodiments, the interfering RNAs comprise a sequence complementary to a sequence of a B2M mRNA. In some embodiments, the interfering RNA is capable of inducing RNAi-mediated degradation of the B2M mRNA. In some embodiments, the B2M mRNA sequence comprises a coding sequence. In some embodiments, the B2M mRNA sequence comprises an untranslated region.

[0156] In some embodiments, the interfering RNA is a short hairpin RNA (shRNA). In some embodiments, the shRNA comprises a first sequence, having from 5′ to 3′ end a sequence complementary to the B2M mRNA; and a second sequence, having from 5′ to 3′ end a sequence complementary to the first sequence, wherein the first sequence and second sequence form the shRNA.

[0157] The disclosure provides gNAs comprising a targeting sequence specific to the B2M gene and B2Mgene regulatory elements. In some embodiments,—the gNA comprise a targeting sequence and a gNA scaffold sequence. In some embodiments, the targeting sequence is complementary to a sequence of the B2M gene.

[0158] In some embodiments, the first sequence is 18, 19, 20, 21, or 22 nucleotides. In some embodiments, the first sequence is complementary to a sequence selected from SEQ ID NOs: 400-5019. In some embodiments, the first sequence has GC content greater than or equal to 25% and less than 60%. In some embodiments, the first sequence is complementary to a sequence selected from SEQ ID NOs: 400-3995. In some embodiments, the first sequence does not comprise four nucleotides of the same base or a run of seven C or G nucleotide bases. In some embodiments, the first sequence is complementary to a sequence selected from SEQ ID NOs: 400-3399. In some embodiments, the first sequence is 21 nucleotides. In some embodiments, the first sequence is complementary to a sequence selected from SEQ ID NOs: 400-981. In some embodiments, the first sequence is complementary to a sequence selected from SEQ ID NOs: 400-681. In some embodiments, the first sequence is complementary to a sequence selected from SEQ ID NOs: 400-537. Illustrative target B2M sequences complementary to the first sequence are shown in Table 2.

TABLE 2
Illustrative target B2M sequences
complementary to first sequence

| SEQ ID | | SEQ ID | |
|---|---|---|---|
| NO | Sequence | NO | Sequence |
| 400 | AGAGAATGGAAAGTCAAATTT | 417 | CTTGCACTCAAAGCTTGTTAA |
| 401 | ATGGACATGATCTTCTTTATA | 418 | AGTTAAGCGTGCATAAGTTAA |
| 402 | TGGACATGATCTTCTTTATAA | 419 | GCATAAGTTAACTTCCAATTT |
| 403 | GGACATGATCTTCTTTATAAT | 420 | TACATACTCTGCTTAGAATTT |
| 404 | TGACAGGATTATTGGAAATTT | 421 | ACATACTCTGCTTAGAATTTG |
| 405 | TTGTGGTTAATCTGGTTTATT | 422 | TTGACAGGATTATTGGAAATT |
| 406 | TGTGGTTAATCTGGTTTATTT | 423 | GACAGGATTATTGGAAATTTG |
| 407 | GCAGAGAATGGAAAGTCAAAT | 424 | TAAGGCATGGTTGTGGTTAAT |
| 408 | CAGAGAATGGAAAGTCAAATT | 425 | GTTGTGGTTAATCTGGTTTAT |
| 409 | GAGAATGGAAAGTCAAATTTC | 426 | GTTCCACAAGTTAAATAAATC |
| 410 | GTCACAGCCCAAGATAGTTAA | 427 | TCCAGCGTACTCCAAAGATTC |
| 411 | TGCTTATACACTTACACTTTA | 428 | TACTCCAAAGATTCAGGTTTA |
| 412 | GCTTATACACTTACACTTTAT | 429 | ACTCCAAAGATTCAGGTTTAC |
| 413 | CTTATACACTTACACTTTATG | 430 | CACGTCATCCAGCAGAGAATG |
| 414 | ACATGGACATGATCTTCTTTA | 431 | GGTTTCATCCATCCGACATTG |
| 415 | CATGGACATGATCTTCTTTAT | 432 | CCGACATTGAAGTTGACTTAC |
| 416 | ATCAACATCTTGGTCAGATTT | 433 | TGAAGAATGGAGAGAGAATTG |
| 434 | GAGCATTCAGACTTGTCTTTC | 476 | TGTCACAGCCCAAGATAGTTA |
| 435 | TTCAGCAAGGACTGGTCTTTC | 477 | CACAGCCCAAGATAGTTAAGT |
| 436 | GCAAGGACTGGTCTTTCTATC | 478 | GCAGCATCATGGAGGTTTGAA |
| 437 | CGTGTGAACCATGTGACTTTG | 479 | CCGCATTTGGATTGGATGAAT |
| 438 | CTTTGTCACAGCCCAAGATAG | 480 | TTGAGTGCTGTCTCCATGTTT |
| 439 | TCACAGCCCAAGATAGTTAAG | 481 | AGTGCTGTCTCCATGTTTGAT |
| 440 | AGTGGGATCGAGACATGTAAG | 482 | CTGTCTCCATGTTTGATGTAT |
| 441 | AGGTTTGAAGATGCCGCATTT | 483 | TCTAGGAGGGCTGGCAACTTA |
| 442 | GGTTTGAAGATGCCGCATTTG | 484 | CAACATCTTGGTCAGATTTGA |
| 443 | TTGATATGCTTATACACTTAC | 485 | GTCAGATTTGAACTCTTCAAT |
| 444 | TGAGTGCTGTCTCCATGTTTG | 486 | TCTTGCACTCAAAGCTTGTTA |
| 445 | TGTCTCCATGTTTGATGTATC | 487 | TGCACTCAAAGCTTGTTAAGA |
| 446 | TCAACATCTTGGTCAGATTTG | 488 | GCACTCAAAGCTTGTTAAGAT |
| 447 | TCAGATTTGAACTCTTCAATC | 489 | CACTCAAAGCTTGTTAAGATA |
| 448 | TTCAATCTCTTGCACTCAAAG | 490 | TCAAAGCTTGTTAAGATAGTT |
| 449 | TTGCACTCAAAGCTTGTTAAG | 491 | CAAAGCTTGTTAAGATAGTTA |
| 450 | ACTCAAAGCTTGTTAAGATAG | 492 | GATAGTTAAGCGTGCATAAGT |
| 451 | AGATAGTTAAGCGTGCATAAG | 493 | ATAGTTAAGCGTGCATAAGTT |
| 452 | TGCATAAGTTAACTTCCAATT | 494 | TAGTTAAGCGTGCATAAGTTA |
| 453 | GTTAACTTCCAATTTACATAC | 495 | TTAAGCGTGCATAAGTTAACT |
| 454 | ATTGACAGGATTATTGGAAAT | 496 | TAAGCGTGCATAAGTTAACTT |
| 455 | GTAAGGCATGGTTGTGGTTAA | 497 | ATTTACATACTCTGCTTAGAA |
| 456 | GGTTGTGGTTAATCTGGTTTA | 498 | TTTACATACTCTGCTTAGAAT |
| 457 | TTCCTGAAGCTGACAGCATTC | 499 | ACAGGATTATTGGAAATTTGT |
| 458 | GCTATCCAGCGTACTCCAAAG | 500 | CAGGATTATTGGAAATTTGTT |
| 459 | CATCCAGCAGAGAATGGAAAG | 501 | AGGCATGGTTGTGGTTAATCT |
| 460 | CAAATTTCCTGAATTGCTATG | 502 | CAGCAGAGAATGGAAAGTCAA |
| 461 | ATTGCTATGTGTCTGGGTTTC | 503 | TCCGACATTGAAGTTGACTTA |
| 462 | GAAGATGCCGCATTTGGATTG | 504 | CTGGTCTTTCTATCTCTTGTA |
| 463 | CAATTTACATACTCTGCTTAG | 505 | CCGTGTGAACCATGTGACTTT |
| 464 | TATCCAGCGTACTCCAAAGAT | 506 | CCCAAGATAGTTAAGTGGGAT |
| 465 | ATCCAGCGTACTCCAAAGATT | 507 | GGTTGCTCCACAGGTAGCTCT |
| 466 | CTCCAAAGATTCAGGTTTACT | 508 | GCTCCACAGGTAGCTCTAGGA |
| 467 | TGCTATGTGTCTGGGTTTCAT | 509 | GGGAGCAGAGAATTCTCTTAT |
| 468 | TTTCATCCATCCGACATTGAA | 510 | GGAGCAGAGAATTCTCTTATC |
| 469 | GAAGTTGACTTACTGAAGAAT | 511 | GAGCAGAGAATTCTCTTATCC |
| 470 | GAAGAATGGAGAGAGAATTGA | 512 | GAGAATTCTCTTATCCAACAT |
| 471 | AGAATGGAGAGAGAATTGAAA | 513 | GAATTCTCTTATCCAACATCA |
| 472 | CAGCAAGGACTGGTCTTTCTA | 514 | AAGTGGAGCATTCAGACTTGT |
| 473 | AGCAAGGACTGGTCTTTCTAT | 515 | AAGGACTGGTCTTTCTATCTC |
| 474 | ACTTTGTCACAGCCCAAGATA | 516 | AAGCTTGTTAAGATAGTTAAG |
| 475 | TTGTCACAGCCCAAGATAGTT | 517 | AAGCGTGCATAAGTTAACTTC |
| 518 | AAGATGCCGCATTTGGATTGG | 528 | AACTCTTCAATCTCTTGCACT |
| 519 | AAGAATGGAGAGAGAATTGAA | 529 | AATTTCCTGAATTGCTATGTG |
| 520 | AACATCAACATCTTGGTCAGA | 530 | AATGGAAAGTCAAATTTCCTG |
| 521 | AAGGCATGGTTGTGGTTAATC | 531 | AACCATGTGACTTTGTCACAG |
| 522 | AAGCAGCATCATGGAGGTTTG | 532 | AATTGACAGGATTATTGGAAA |
| 523 | AAGATGAGTATGCCTGCCGTG | 533 | AATTCTCTTATCCAACATCAA |
| 524 | AAGTTGACTTACTGAAGAATG | 534 | AAAGTGGAGCATTCAGACTTG |
| 525 | AAGATAGTTAAGCGTGCATAA | 535 | AAAGTCAAATTTCCTGAATTG |
| 526 | AACTTCCAATTTACATACTCT | 536 | GTTGCTCCACAGGTAGCTCTA |
| 527 | AACATCTTGGTCAGATTTGAA | 537 | AATTTACATACTCTGCTTAGA |

[0159] In some cases, the first sequence may have 100% identity, i.e. complete identity, homology, complementarity to the target nucleic acid sequence. In other cases, there may be one or more mismatches between the first sequence and the target nucleic acid sequence. For example, there may be 1, 2, 3, 4, 5, 6, or 7 mismatches between the sense region and the target nucleic acid sequence.

[0160] The sequences set forth in Table 2 are presented as DNA sequences. In all sequences set forth in Table 2, thymine (T) may be replaced by uracil (U) to arrive at the sequence of the interfering RNA sequence.

[0161] In some embodiments, the first and second sequence are present on a single stranded polynucleotide, wherein the first sequence and second sequence are separated by 4, 5, 6, 7, 8, 9, 10, 11, 12, 13, 14, or 15 nucleotides, wherein the 4, 5, 6, 7, 8, 9, 10, 11, 12, 13, 14, or 15 nucleotides form a loop region in the shRNA. In some embodiments, the loop region comprises a sequence selected from SEQ ID NOs: 5030-5043. Illustrative loop region sequences are shown in Table 3.

TABLE 3
Illustrative loop region sequences

| SEQ ID NO | Loop Region Sequence |
|---|---|
| 5030 | CGAA |
| 5031 | UUCAAGA |
| 5032 | AUAUUCA |
| 5033 | UGUGCUGUC |
| 5034 | CUCGAG |
| 5035 | CUUCCUGUCAGA |
| 5036 | CUUCCCUUUGUCAGA |
| 5037 | GUGUUAUUCUUG |
| 5038 | GUGUCUUAAUUG |
| 5039 | GUGUUAGUCUUG |
| 5040 | UCAAGAG |
| 5041 | GGACAUCCAGGG |
| 5042 | GUGAAGCCACAGAUG |
| 5043 | GAUUCUAAAA |

[0162] In some embodiments, the first sequence and second sequence are separated by a linker, sometimes referred to as a loop. In some embodiments, both the first sequence and the second sequence are encoded by one single-stranded RNA or DNA vector. In some embodiments, the loop is between the first and second sequences. In these embodiments, and the first sequence and the second sequence hybridize to form a duplex region. The first sequence and second sequence are joined by a linker sequence, forming a “hairpin” or “stem-loop” structure. The shRNA can have complementary first sequences and second sequences at opposing ends of a single stranded molecule, so that the molecule can form a duplex region with the complementary sequence portions, and the strands are linked at one end of the duplex region by a linker (i.e. loop sequence). The linker, or loop sequence, can be either a nucleotide or non-nucleotide linker. The linker can interact with the first sequence, and optionally, second sequence through covalent bonds or non-covalent interactions.

[0163] Any suitable nucleotide loop sequence is envisaged as within the scope of the disclosure. An shRNA of this disclosure may include a nucleotide, non-nucleotide, or mixed nucleotide/non-nucleotide linker that joins the first sequence of the shRNA to the second sequence of the shRNA. A nucleotide loop sequence can be >2 nucleotides in length, for example about 4, 5, 6, 7, 8, 9, 10, 11, 12, 13, 14, or 15 nucleotides in length.

[0164] Examples of a non-nucleotide linker include an abasic nucleotide, polyether, polyamine, polyamide, peptide, carbohydrate, lipid, polyhydrocarbon, or other polymeric agents, for example polyethylene glycols such as those having from 2 to 100 ethylene glycol units. Some examples are described in Seela et al., Nucleic Acids Research, 1987, Vol. 15, pp. 3113-3129; Cload et al., J. Am. Chem. Soc, 1991, Vol. 113, pp. 6324-6326; Jaeschke et al., Tetrahedron Lett., 1993, Vol. 34, pp. 301; Arnold et al., WO 1989/002439; Usman et al., WO 1995/006731; Dudycz et al., WO 1995/011910, and Ferentz et al., J. Am. Chem. Soc, 1991, Vol. 113, pp. 4000-4002.

[0165] In some embodiments, the shRNA further comprises a 5′ flank sequence and a 3′ flank sequence. In some embodiments, wherein the 5′ flank sequence is joined to the 5′ end of the first sequence, and wherein the 3′ flank sequence is joined to the 3′ end of the second sequence.

[0166] In some embodiments, the shRNA is capable of inducing RNAi-mediated degradation of the B2M mRNA. In some embodiments, the shRNA is encoded by a sequence comprising a sequence of GCACTCAAAGCTTGTTAAGATCGAAATCTTAACAAGCTTTGAGTGC (SEQ ID NO: 5055) or GTTAACTTCCAATTTACATACCGAAGTATGTAAATTGGAAGTTAAC (SEQ ID NO: 5056), or a sequence having at least 80%, at least 90%, or at least 95% identity thereto.

[0167] Without wishing to be bound by theory, it is thought that flanking shRNA stem loop sequence with 5′ and 3′ sequences similar to those found in microRNAs can target the shRNA for processing by the endogenous microRNA processing machinery, increasing the effectiveness of shRNA processing. Alternatively, or in addition, flanking sequences may increase shRNA compatibility with polymerase II or polymerase III promoters, leading to more effective regulation of shRNA expression.

[0168] In some embodiments, the 5′ flank sequence is selected from SEQ ID NO: 5044-5047. In some embodiments, the 3′ flank sequence is selected from SEQ ID NO: 5048-5050. Illustrative flank sequence are shown in Table 4.

TABLE 4
Illustrative flank sequences

| SEQ ID NO | 5′ Flank Sequence |
|---|---|
| 5044 | GG |
| 5045 | ACACCAUGUUGCCAGUCUCUAGG |
| 5046 | UGAUAGCAAUGUCAGCAGUGCCU |
| 5047 | UAUUGCUGUUGACAGUGAGCGAC |
| SEQ ID NO | 3′ Flank Sequence |
| 5048 | UGGCGUCUGGCCCAACCACAC |
| 5049 | GUAAGGUUGACCAUACUCUAC |
| 5050 | UGCCUACUGCCUCGGACUUCA |

[0169] shRNAs of the disclosure may be generated exogenously by chemical synthesis, by in vitro transcription, or by cleavage of longer double-stranded RNA with Dicer or another appropriate nuclease with similar activity. Chemically synthesized siRNAs, produced from protected ribonucleoside phosphoramidites using a conventional DNA/RNA synthesizer, may be obtained from commercial suppliers such as Millipore Sigma (Houston, Tex.), Ambion Inc. (Austin, Tex.). Invitrogen (Carlsbad, Calif.), or Dharmacon (Lafayette, Colo.). siRNAs can be purified by extraction with a solvent or resin, precipitation, electrophoresis, chromatography, or a combination thereof, for example. Alternatively, siRNAs may be used with little if any purification to avoid losses due to sample processing.

[0170] In some embodiments, shRNAs of the disclosure can be produced using an expression vector into which a nucleic acid encoding the double stranded RNA has been cloned, for example under control of a suitable promoter.

### Activators

[0171] The disclosure provides a first ligand, an activator, and a first engineered receptor comprising the first ligand binding domain that binds to the first activator ligand.

[0172] The disclosure provides a first engineered receptor comprising an extracellular region, the extracellular region comprising a first ligand binding domain capable of specifically binding a first ligand that activates or promotes activation of the receptor, which promotes activation of effector cells expressing the receptor. The disclosure further provides a second engineered receptor comprising a second ligand binding domain capable of binding a second ligand, wherein binding of the second ligand by the second ligand binding domain inhibits or reduces activation of effector cells even in the presence of the first receptor bound to the first ligand.

[0173] As used herein, an “activator” or “activator ligand” refers to a first ligand that binds to a first, activator ligand binding domain (LBD) of an engineered receptor of the disclosure, such as a CAR or TCR, thereby mediating activation of a T cell expressing the engineered receptor. The activator is expressed by target cells, for example cancer cells, and may also be expressed more broadly than just the target cells. For example the activator can be expressed on some, or all types of normal, non-target cells.

[0174] In some embodiments, the first ligand is a peptide ligand from any of the activator targets disclosed herein. In some embodiments, the first ligand is a peptide antigen complexed with a major histocompatibility (MHC) class I complex (peptide MHC, or pMHC), for example an MHC complex comprising human leukocyte antigen A*02 allele (HLA-A*02).

[0175] Target cell-specific first activator ligands comprising peptide antigens complexed with pMHC comprising any of human leukocyte antigen (HLA) HLA-A, HLA-B, HLA-C, HLA-E, HLA-F, and HLA-G are envisaged as within the scope of the disclosure. In some embodiments, the first ligand comprises a pMHC comprising HLA-A. HLA-A receptors are heterodimers comprising a heavy α chain and smaller β chain. The α chain is encoded by a variant of HLA-A, while the β chain (β2-microglobulin) is an invariant. There are several thousand HLA-A gene variants, all of which fall within the scope of the instant disclosure. In some embodiments, the MHC-I comprises a human leukocyte antigen A*02 allele (HLA-A*02).

[0176] In some embodiments, the first activator ligand comprises a pMHC comprising HLA-B. Hundreds of versions (alleles) of the HLA-B gene are known, each of which is given a particular number (such as HLA-B*27).

[0177] In some embodiments, the first activator ligand comprises a pMHC comprising HLA-C. HLA-C belongs to the HLA class I heavy chain paralogues. This class I molecule is a heterodimer consisting of a heavy chain and a light chain (beta-2 microglobulin). Over one hundred HLA-C alleles are known in the art.

[0178] In some embodiments, the first activator ligand comprises a pMHC comprising HLA-A. In some embodiments, the first activator ligand comprises a pMHC comprising HLA-B. In some embodiments, the first activator ligand comprises a pMHC comprising HLA-C. In some embodiments, the first activator ligand comprises a pMHC comprising HLA-E. In some embodiments, the first activator ligand comprises a pMHC comprising HLA-F. In some embodiments, the first activator ligand comprises a pMHC comprising HLA-G.

[0179] In some embodiments, the first activator ligand comprises HLA-A. In some embodiments, the first activator ligand comprises HLA-B. In some embodiments, the first activator ligand comprises HLA-C. In some embodiments, the first activator ligand comprises HLA-E. In some embodiments, the first activator ligand comprises HLA-F. In some embodiments, the first activator ligand comprises HLA-G. In some embodiments, the first activator ligand comprises HLA-A, HLA-B, HLA-C, HLA-E, HLA-F or HLA-G.

[0180] In some embodiments, the first, activator ligand binding domain comprises an scFv domain.

[0181] In some embodiments, the first, activator ligand binding domain comprises a Vβ-only ligand binding domain.

[0182] In some embodiments, the first, activator ligand binding domain comprises an antigen binding domain isolated or derived from a T cell receptor (TCR). For example, the first, activator ligand binding domain comprises TCR α and β chain variable domains.

[0183] In some embodiments, the first, activator ligand and the second, inhibitor ligand are not the same.

[0184] In some embodiments, the first, activator ligand is expressed by target cells and is not expressed by non-target cells (i.e. normal cells not targeted by the adoptive cell therapy). In some embodiments, the target cells are cancer cells and the non-target cells are non-cancerous cells.

[0185] In some embodiments, the activator ligand has high cell surface expression on the target cells. This high cell surface expression confers the ability to deliver large activation signals. Methods of measuring cell surface expression will be known to the person of ordinary skill in the art and include, but are not limited to, immunohistochemistry using an appropriate antibody against the activator ligand, followed by microscopy or fluorescence activated cell sorting (FACS).

[0186] In some embodiments, the activator ligand is encoded by a gene with an essential cellular function. Essential cellular functions are functions required for a cell to live, and include protein and lipid synthesis, cell division, replication, respiration, metabolism, ion transport, and providing structural support for tissues. Selecting activator ligands encoded by genes with essential cellular functions prevents loss of the activator ligand due to aneuploidy in cancer cells, and makes gene encoding the activator ligand less likely to undergo mutagenesis during the evolution of the cancer. In some embodiments, the activator ligand is encoded by a gene that is haploinsufficient, i.e. loss of copies of the gene encoding the activator ligand are not tolerated by the cell and lead to cell death or a disadvantageous mutant phenotype.

[0187] In some embodiments, the activator ligand is present on all target cells. In some embodiments, the target cells are cancer cells.

[0188] In some embodiments, the activator ligand is present on a plurality of target cells. In some embodiments, the target cells are cancer cells. In some embodiments, the activator ligand is present on at least 50%, at least 60%, at least 70%, at least 80%, at least 85%, at least 90%, at least 95%, at least 96%, at least 97%, at least 98%, at least 99%, at least 99.5% or at least 99.9% of target cells. In some embodiments, the activator ligand is present on at least 95% target cells. In some embodiments, the activator ligand is present on at least 99% target cells.

[0189] In some embodiments, the activator ligand is present on all cells (ubiquitous activator ligands). Activator ligands can be expressed on all cells, if, for example, the second inhibitor ligand is also expressed on all cells except the target cells.

[0190] In some embodiments, the first, activator ligand is expressed by a plurality of target cells and a plurality of non-target cells. In some embodiments, the plurality of non-target cells expresses both the first, activator ligand and the second inhibitor ligand.

[0191] In some embodiments, and the first, activator ligand and second, inhibitor ligand are present on the plurality of non-target target cells at a ratio of about 1:100 to about 100:1 of the first ligand to the second ligand. In some embodiments, and the first, activator ligand and second, inhibitor ligand are present on the plurality of non-target target cells at a ratio of about 1:50 to about 50:1 of the first ligand to the second ligand. In some embodiments, and the first, activator ligand and second, inhibitor ligand are present on the plurality of non-target target cells at a ratio of about 1:25 to about 25:1 of the first ligand to the second ligand. In some embodiments, and the first, activator ligand and second, inhibitor ligand are present on the plurality of non-target target cells at a ratio of about 1:10 to about 10:1 of the first ligand to the second ligand. In some embodiments, and the first, activator ligand and second, inhibitor ligand are present on the plurality of non-target target cells at a ratio of about 1:5 to about 5:1 of the first ligand to the second ligand. In some embodiments, and the first, activator ligand and second, inhibitor ligand are present on the plurality of non-target target cells at a ratio of about 1:3 to about 3:1 of the first ligand to the second ligand. In some embodiments, and the first, activator ligand and second, inhibitor ligand are present on the plurality of non-target target cells at a ratio of about 1:2 to about 2:1 of the first ligand to the second ligand. In some embodiments, and the first, activator ligand and second, inhibitor ligand are present on the plurality of non-target target cells at a ratio of about 1:1.

[0192] The first, activator ligand is recognized by a first ligand binding domain (sometimes referred to herein as the activator LBD).

[0193] Exemplary activator ligands include ligands selected from the group consisting of cell adhesion molecules, cell-cell signaling molecules, extracellular domains, molecule involved in chemotaxis, glycoproteins, G protein-coupled receptors, transmembrane proteins, receptors for neurotransmitters and voltage gated ion channels. In some embodiments, the first, activator ligand is transferrin receptor (TFRC) or a peptide antigen thereof. Human transferrin receptor is described in NCBI record No. AAA61153.1, the contents of which are incorporated herein by reference. In some embodiments, TFRC is encoded by a sequence of SEQ ID NO: 18.

[0194] In some embodiments, the activator ligand is a tumor specific antigen (TSA). In some embodiments, the tumor specific antigen is mesothelin (MSLN), CEA cell adhesion molecule 5 (CEACAMS, or CEA), epidermal growth factor receptor (EGFR) or a peptide antigen thereof. In some embodiments, the TSA is MSLN, CEA, EGFR, delta like canonical Notch ligand 4 (DLL4), mucin 16, cell surface associated (MUC 16 also known as CA125), ganglioside GD2 (GD2), receptor tyrosine kinase like orphan receptor 1 (ROR1), erb-b2 receptor tyrosine kinase 2 (HER2/NEU) or a peptide antigen thereof. Exemplary mouse and humanized scFv antigen binding domains targeting TSAs are shown in Table 5 below:

TABLE 5
Exemplary scFv antigen binding domains that
target tumor specific antigens (TSAs)

MSLN binding domains

| | |
|---|---|
| C-002357 MSLN_(M5): | C-002357 |
| QVQLVQSGAEVEKPGASVKVSCKASGYTFTDYYMHWVRQAPGQGL | MSLN_(M5) |
| EWMGWINPNSGGTNYAQKFQGRVTMTRDTSISTAYMELSRLRSDDT | DNA |
| AVYYCASGWDFDYWGQGTLVTVSSGGGGSGGGGSGGGGSGGDIV | Sequence: SEQ |
| MTQSSSLSASVGDRVTITCRASQSIRYYLSWYQQKPGKAPKLLIYTAS | ID NO: 87 |
| ILQNGVPSRFSGSGSGTDFTLTISSLQPEDFATYYCLQTYTTPDFGPGT | |
| KVEIK (SEQ ID NO: 86) | |
| C-002358 MSLN_(M14): | C-002358 |
| QVQLVQSGAEVRAPGASVKISCKASGFTFRGYYIHWVRQAPGQGLE | MSLN_(M14) |
| WMGIINPSGGSRAYAQKFQGRVTMTRDTSTSTVYMELSSLRSDDTA | DNA |
| MYYCARTASCGGDCYYLDYWGQGTLVTVSSGGGGSGGGGSGGGG | Sequence: |
| SGGDIQMTQSPPTLSASVGDRVTITCRASENVNIWLAWYQQKPGKAP | SEQ ID NO: |
| KLLIYKSSSLASGVPSRFSGSGSGAEFTLTISSLQPDDFATYYCQQYQS | 89 |
| YPLTFGGGTKVEIK (SEQ ID NO: 88) | |
| C-002359 MSLN_(S5H): | C-002359 |
| QVQLVQSGAEVKKPGASVKVSCKASGYSFTGYTMNWVRQAPGQRL | MSLN_(S5H) |
| EWMGLITPYNGASSYNQKFRGRVTITRDTSASTAYMELSSLRSEDTA | DNA |
| VYYCARGGYDGRGFDYWGQGTTVTVSSGGGGSGGGGSGGGGSGG | Sequence: SEQ |
| DIQMTQSPSSLSASVGDRVTITCSASSSVSYMHWYQQKPGKAPKRLI | ID NO: 91 |
| YDTSKLASGVPSRFSGSGSGTEFTLTISSLQPEDFATYYCQQWSGYPL | |
| TFGQGTKLEIK (SEQ ID NO: 90) | |
| C-002360 MSLN_(S5M): | C-002360 |
| QVQLQQSGPELEKPGASVKISCKASGYSFTGYTMNWVKQSHGKSLE | MSLN_(S5M) |
| WIGLITPYNGASSYNQKFRGKATLTVDKSSSTAYMDLLSLTSEDSAV | DNA |
| YFCARGGYDGRGFDYWGQGTTVTVSSGGGGSGGGGSGGGGSGGDI | Sequence: SEQ |
| ELTQSPAIMSASPGEKVTMTCSASSSVSYMHWYQQKSGTSPKRWIY | ID NO: 93 |
| DTSKLASGVPGRFSGSGSGNSYSLTISSVEAEDDATYYCQQWSGYPL | |
| TFGAGTKLEIK (SEQ ID NO: 92) | |

CEACAM5 binding domains

| | |
|---|---|
| C-002361 CEACAM5_(MFE23M): | C-002361 |
| QVQLQQSGAELVRSGTSVKLSCTASGFNIKDSYMHWLRQGPEQGLE | CEACAM5_(MFE23M) |
| WIGWIDPENGDTEYAPKFQGKATFTTDTSSNTAYLQLSSLTSEDTAV | DNA |
| YYCNEGTPTGPYYFDYWGQGTTVTVSSGGGGSGGGGSGGGGSGGE | Sequence: SEQ |
| NVLTQSPAIMSASPGEKVTITCSASSSVSYMHWFQQKPGTSPKLWIYS | ID NO: 95 |
| TSNLASGVPARFSGSGSGTSYSLTISRMEAEDAATYYCQQRSSYPLTF | |
| GAGTKLELK (SEQ ID NO: 94) | |
| C-002362 CEACAM5_(MFE23H): | C-002362 |
| QVQLVQSGAEVKKPGASVKVSCKASGFNIKDSYMHWVRQAPGQGL | CEACAM5_(MFE23H) |
| EWMGWIDPENGDTEYAPKFQGRVTMTTDTSTSTAYMELRSLRSDDT | DNA |
| AVYYCNEGTPTGPYYFDYWGQGTTVTVSSGGGGSGGGGSGGGGSG | Sequence: SEQ |
| GEIVLTQSPATLSLSPGERATLSCSASSSVSYMHWYQQKPGLAPRLLI | ID NO: 97 |
| YSTSNLASGIPDRFSGSGSGTDFTLTISRLEPEDFAVYYCQQRSSYPLT | |
| FGQGTKLEIK (SEQ ID NO: 96) | |
| C-002363 CEACAM5_(E8): | C-002363 |
| EVQLAESGGGLVQPGGSLRLSCAASGFTFSSDAMSWVRQAPGKGLE | CEACAM5_(E8) |
| WVSAISGSGGSTYYADSVKGRFTISRDNSKNTLYLQMNSLRAEDTA | DNA |
| VYYCAKSNEFLFDYWGQGTLVTVSSGGGGSGGGGSGGGGSGGSSEL | Sequence: SEQ |
| TQDPAVSVALGQTVRITCQGDSLRSSYASWYRQRPGQAPVLVIYGK | ID NO: 99 |
| NNRPSGIPDRFSGSSSGNTASLTITGAQAEDEADYYWNSSYAWLPYV | |
| VFGGGTKLTVLG(SEQ ID NO: 98) | |
| C-002364 CEACAM5_(SM3E): | C-002364 |
| QVQLEQSGAGVVKPGASVKLSCKASGFNIKDSYMHWLRQGPGQRL | CEACAM5_(SM3E) |
| EWIGWIDPENGDTEYAPKFQGKATFTTDTSANTAYLGLSSLRPEDTA | DNA |
| VYYCNEGTPTGPYYFDYWGQGTLVTVSSGGGGSGGGGSGGGGSGG | Sequence: SEQ |
| ENVLTQSPSSMSVSVGDRVNIACSASSSVPYMHWLQQKPGKSPKLLI | ID NO: 101 |
| YLTSNLASGVPSRFSGSGSGTDYSLTISSVQPEDAATYYCQQRSSYPL | |
| TFGGGTKLEIK (SEQ ID NO: 100) | |
| CT618 CEA scFv: | CT618 CEA |
| QVQLVQSGSELKKPGASVKVSCKASGYTFTEFGMNWVRQAPGQGL | scFv DNA |
| EWMGWINTKTGEATYVEEFKGRFVFSLDTSVSTAYLQISSLKAEDTA | Sequence: SEQ |
| VYYCARWDFAYYVEAMDYWGQGTTVTVSSGGGGSGGGGSGGGGS | ID NO: 283 |
| GGDIQMTQSPSSLSASVGDRVTITCKASQNVGTNVAWYQQKPGKAP | |
| KLLIYSASYRYSGVPSRFSGSGSGTDFTLTISSLQPEDFATYYCHQYY | |
| TYPLFTFGQGTKLEIK (SEQ ID NO: 282) | |
| CT619 CEA scFv: | CT619 CEA |
| QVQLVQSGAEVKKPGASVKVSCKASGYTFTEFGMNWVRQAPGQGL | scFv DNA |
| EWMGWINTKTGEATYVEEFKGRVTFTTDTSTSTAYMELRSLRSDDT | Sequence: SEQ |
| AVYYCARWDFAYYVEAMDYWGQGTTVTVSSGGGGSGGGGSGGG | ID NO: 285 |
| GSGGDIQMTQSPSSLSASVGDRVTITCKASAAVGTYVAWYQQKPGK | |
| APKLLIYSASYRKRGVPSRFSGSGSGTDFTLTISSLQPEDFATYYCHQ | |
| YYTYPLFTFGQGTKLEIK (SEQ ID NO: 284) | |
| CT620 CEA scFv: | CT620 CEA |
| QVQLVQSGSELKKPGASVKVSCKASGYTFTEFGMNWVRQAPGQGL | scFv DNA |
| EWMGWINTKTGEATYVEEFKGRFVFSLDTSVSTAYLQISSLKAEDTA | Sequence: SEQ |
| VYYCARWDFAHYFQTMDYWGQGTTVTVSSGGGGSGGGGSGGGGS | ID NO: 287 |
| GGDIQMTQSPSSLSASVGDRVTITCKASAAVGTYVAWYQQKPGKAP | |
| KLLIYSASYRKRGVPSRFSGSGSGTDFTLTISSLQPEDFATYYCHQYY | |
| TYPLFTFGQGTKLEIK (SEQ ID NO: 286) | |

EGFR binding domains

| | |
|---|---|
| CT-478 EGFR (VH-VL scFv Format): | CT-478 EGFR |
| QVQLVESGGGVVQPGRSLRLSCAASGFTFSTYGMHWVRQAPGKGL | DNA |
| EWVAVIWDDGSYKYYGDSVKGRFTISRDNSKNTLYLQMNSLRAED | Sequence: SEQ |
| TAVYYCARDGITMVRGVMKDYFDYWGQGTLVTVSSGGGGSGGGG | ID NO: 103 |
| SGGGGSGGAIQLTQSPSSLSASVGDRVTITCRASQDISSALVWYQQKP | |
| GKAPKLLIYDASSLESGVPSRFSGSESGTDFTLTISSLQPEDFATYYCQ | |
| QFNSYPLTFGGGTKVEIK (SEQ ID NO: 102) | |
| CT-479 EGFR (VL-VH scFv Format): | CT-479 EGFR |
| AIQLTQSPSSLSASVGDRVTITCRASQDISSALVWYQQKPGKAPKLLI | DNA |
| YDASSLESGVPSRFSGSESGTDFTLTISSLQPEDFATYYCQQFNSYPLT | Sequence: SEQ |
| FGGGTKVEIKGGGGSGGGGSGGGGSGGQVQLVESGGGVVQPGRSL | ID NO: 105 |
| RLSCAASGFTFSTYGMHWVRQAPGKGLEWVAVIWDDGSYKYYGDS | |
| VKGRFTISRDNSKNTLYLQMNSLRAEDTAVYYCARDGITMVRGVM | |
| KDYFDYWGQGTLVTVSS (SEQ ID NO: 104) | |
| CT-480 EGFR (VH-VL scFv format): | CT-480 EGFR |
| QIQLVQSGPELKKPGETVKISCKASGYTFTEYPIHWVKQAPGKGFKW | DNA |
| MGMIYTDIGKPTYAEEFKGRFAFSLETSASTAYLQINNLKNEDTATY | Sequence: |
| FCVRDRYDSLFDYWGQGTTLTVSSGGGGSGGGGSGGGGSGGDVVM | SEQ ID NO: |
| TQTPLSLPVSLGDQASISCRSSQSLVHSNGNTYLHWYLQKPGQSPKL | 107 |
| LIYKVSNRFSGVPDRFSGSGSGTDFTLKISRVEAEDLGVYFCSQSTHV | |
| PWTFGGGTKLEIK (SEQ ID NO: 106) | |
| CT-481 EGFR (VL-VH scFv Format): | CT-481 EGFR |
| DVVMTQTPLSLPVSLGDQASISCRSSQSLVHSNGNTYLHWYLQKPG | DNA |
| QSPKLLIYKVSNRFSGVPDRFSGSGSGTDFTLKISRVEAEDLGVYFCS | Sequence: |
| QSTHVPWTFGGGTKLEIKGGGGSGGGGSGGGGSGGQIQLVQSGPEL | SEQ ID NO: |
| KKPGETVKISCKASGYTFTEYPIHWVKQAPGKGFKWMGMIYTDIGK | 109 |
| PTYAEEFKGRFAFSLETSASTAYLQINNLKNEDTATYFCVRDRYDSLF | |
| DYWGQGTTLTVSS (SEQ ID NO: 108) | |
| CT-482 EGFR (VH-VL scFv Format): | CT-482 EGFR |
| EMQLVESGGGFVKPGGSLKLSCAASGFAFSHYDMSWVRQTPKQRLE | DNA |
| WVAYIASGGDITYYADTVKGRFTISRDNAQNTLYLQMSSLKSEDTA | Sequence: |
| MFYCSRSSYGNNGDALDFWGQGTSVTVSSGGGGSGGGGSGGGGSG | SEQ ID NO: |
| GDVVMTQTPLSLPVSLGDQASISCRSSQSLVHSNGNTYLHWYLQKP | 111 |
| GQSPKLLIYKVSNRFSGVPDRFSGSGSGTDFTLKISRVEAEDLGVYFC | |
| SQSTHVLTFGSGTKLEIK (SEQ ID NO: 110) | |
| CT-483 EGFR (VL-VH scFv Format): | CT-483 EGFR |
| DVVMTQTPLSLPVSLGDQASISCRSSQSLVHSNGNTYLHWYLQKPG | DNA |
| QSPKLLIYKVSNRFSGVPDRFSGSGSGTDFTLKISRVEAEDLGVYFCS | Sequence: |
| QSTHVLTFGSGTKLEIKGGGGSGGGGSGGGGSGGEMQLVESGGGFV | SEQ ID NO: |
| KPGGSLKLSCAASGFAFSHYDMSWVRQTPKQRLEWVAYIASGGDIT | 113 |
| YYADTVKGRFTISRDNAQNTLYLQMSSLKSEDTAMFYCSRSSYGNN | |
| GDALDFWGQGTSVTVSS (SEQ ID NO: 112) | |
| CT-486 EGFR (VH-VL scFv Format): | CT-486 EGFR |
| QVQLKQSGPGLVQPSQSLSITCTVSGFSLTNYGVHWVRQSPGKGLE | DNA |
| WLGVIWSGGNTDYNTPFTSRLSINKDNSKSQVFFKMNSLQSNDTAIY | Sequence: |
| YCARALTYYDYEFAYWGQGTLVTVSAGGGGSGGGGSGGGGSGGDI | SEQ ID NO: |
| LLTQSPVILSVSPGERVSFSCRASQSIGTNIHWYQQRTNGSPRLLIKYA | 115 |
| SESISGIPSRFSGSGSGTDFTLSINSVESEDIADYYCQQNNNWPTTFGA | |
| GTKLELK (SEQ ID NO: 114) | |
| CT-487 EGFR (VH-VL scFv Format): | CT-487 EGFR |
| QVQLVQSGAEVKKPGASVKVSCKASGYTFTSHWMHWVRQAPGQG | DNA |
| LEWIGEFNPSNGRTNYNEKFKSKATMTVDTSTNTAYMELSSLRSEDT | Sequence: |
| AVYYCASRDYDYDGRYFDYWGQGTLVTVSSGGGGSGGGGSGGGG | SEQ ID NO: |
| SGGDIQMTQSPSSLSASVGDRVTITCSASSSVTYMYWYQQKPGKAPK | 117 |
| LLIYDTSNLASGVPSRFSGSGSGTDYTFTISSLQPEDIATYYCQQWSSH | |
| IFTFGQGTKVEIK (SEQ ID NO: 116) | |
| CT-488 EGFR (VH-VL scFv Format): | CT-488 EGFR |
| QVQLQESGPGLVKPSETLSLTCTVSGGSVSSGDYYWTWIRQSPGKGL | DNA |
| EWIGHIYYSGNTNYNPSLKSRLTISIDTSKTQFSLKLSSVTAADTAIYY | Sequence: |
| CVRDRVTGAFDIWGQGTMVTVSSGGGGSGGGGSGGGGSGGDIQMT | SEQ ID NO: |
| QSPSSLSASVGDRVTITCQASQDISNYLNWYQQKPGKAPKLLIYDAS | 119 |
| NLETGVPSRFSGSGSGTDFTFTISSLQPEDIATYFCQHFDHLPLAFGGG | |
| TKVEIK (SEQ ID NO: 118) | |
| CT-489 EGFR scFv: | ND |
| QVQLQESGPGLVKPSQTLSLTCTVSGGSISSGDYYWSWIRQPPGKGL | |
| EWIGYIYYSGSTDYNPSLKSRVTMSVDTSKNQFSLKVNSVTAADTAV | |
| YYCARVSIFGVGTFDYWGQGTLVTVSSGGGGSGGGGSGGGGSGGEI | |
| VMTQSPATLSLSPGERATLSCRASQSVSSYLAWYQQKPGQAPRLLIY | |
| DASNRATGIPARFSGSGSGTDFTLTISSLEPEDFAVYYCHQYGSTPLTF | |
| GGGTKAEIK (SEQ ID NO: 391) | |

CD19 Binding Domains

| | |
|---|---|
| C-2096 CD19 scFv: | C-2096 CD19 |
| DIQMTQTTSSLSASLGDRVTISCRASQDISKYLNWYQQKPDGTVKLLI | scFv DNA |
| YHTSRLHSGVPSRFSGSGSGTDYSLTISNLEQEDIATYFCQQGNTLPY | Sequence: SEQ |
| TFGGGTKLEITGGGGSGGGGSGGGGSEVKLQESGPGLVAPSQSLSVT | ID NO: 276 |
| CTVSGVSLPDYGVSWIRQPPRKGLEWLGVIWGSETTYYNSALKSRLT | |
| IIKDNSKSQVFLKMNSLQTDDTAIYYCAKHYYYGGSYAMDYWGQG | |
| TSVTVSS (SEQ ID NO: 275) | |
| C-2815 CD19 scFv: | C-2815 CD19 |
| DIQMTQTTSSLSASLGDRVTISCRASQDISKYLNWYQQKPDGTVKLLI | scFv DNA |
| YHTSRLHSGVPSRFSGSGSGTDYSLTISNLEQEDIATYFCQQGNTLPY | Sequence: SEQ |
| TFGGGTKLEITGGGGSGGGGSGGGGSGGEVKLQESGPGLVAPSQSLS | ID NO: 278 |
| VTCTVSGVSLPDYGVSWIRQPPRKGLEWLGVIWGSETTYYNSALKS | |
| RLTIIKDNSKSQVFLKMNSLQTDDTAIYYCAKHYYYGGSYAMDYW | |
| GQGTSVTVSS (SEQ ID NO: 277) | |

[0195] In some embodiments, the activator ligand is MSLN or a peptide antigen thereof, and the activator ligand binding domain comprises a MSLN binding domain. In some embodiments, the MSLN ligand binding domain comprises an scFv domain. In some embodiments, the MSLN ligand binding domain comprises a sequence of SEQ ID NO: 86, SEQ ID NO: 88, SEQ ID NO: 90 or SEQ ID NO: 92. In some embodiments, the MSLN ligand binding domain comprises a sequence at least 90%, at least 95% or at least 99% identical to SEQ ID NO: 86, SEQ ID NO: 88, SEQ ID NO: 90 or SEQ ID NO: 92. In some embodiments, the MSLN ligand binding domain is encoded by a sequence comprising SEQ ID NO: 87, SEQ ID NO: 89, SEQ ID NO: 91 or SEQ ID NO: 93. In some embodiments, the MSLN ligand binding domain is encoded by a sequence having at least 80% identity, at least 85% identity, at least 90% identity, at least 95% identity or at least 99% identity to a sequence of SEQ ID NO: 87, SEQ ID NO: 89, SEQ ID NO: 91 or SEQ ID NO: 93.

[0196] In some embodiments, the activator ligand is CEA or a peptide antigen thereof, and the activator ligand binding domain comprises a CEA binding domain. In some embodiments, the CEA ligand binding domain comprises an scFv domain. In some embodiments, the CEA ligand binding domain comprises a sequence of SEQ ID NO: 94, SEQ ID NO: 96, SEQ ID NO: 98, SEQ ID NO: 100, SEQ ID NO: 282, SEQ ID NO: 284 or SEQ ID NO: 286. In some embodiments, the CEA ligand binding domain comprises a sequence at least 90%, at least 95% or at least 99% identical to SEQ ID NO: 94, SEQ ID NO: 96, SEQ ID NO: 98, SEQ ID NO: 100, SEQ ID NO: 282, SEQ ID NO: 284 or SEQ ID NO: 286. In some embodiments, the CEA ligand binding domain is encoded by a sequence comprising SEQ ID NO: 95, SEQ ID NO: 97, SEQ ID NO: 99, SEQ ID NO: 101, SEQ ID NO: 283, SEQ ID NO: 285 or SEQ ID NO: 287. In some embodiments, the CEA ligand binding domain is encoded by a sequence having at least 80% identity, at least 85% identity, at least 90% identity, at least 95% identity or at least 99% identity to a sequence of SEQ ID NO: 95, SEQ ID NO: 97, SEQ ID NO: 99, SEQ ID NO: 101, SEQ ID NO: 283, SEQ ID NO: 285 or SEQ ID NO: 287.

[0197] In some embodiments, the activator ligand is CEA or a peptide antigen thereof, and the activator ligand binding domain comprises a CEA binding domain. In some embodiments, the CEA ligand binding domain comprises a CDR-H1 of EFGMN (SEQ ID NO: 294), a CDR-H2 of WINTKTGEATYVEEFKG (SEQ ID NO: 295), a CDR-H3 of WDFAYYVEAMDY (SEQ ID NO: 296) or WDFAHYFQTMDY (SEQ ID NO: 297), a CDR-L1 of KASQNVGTNVA (SEQ ID NO: 298) or KASAAVGTYVA (SEQ ID NO: 299), a CDR-L2 of SASYRYS (SEQ ID NO: 300) or SASYRKR (SEQ ID NO: 301), and a CDR-L3 of HQYYTYPLFT (SEQ ID NO: 302) or sequences having at least 85% or at least 95% identity thereto. In some embodiments, a CEA scFv comprises a CDR-H1 of EFGMN (SEQ ID NO: 294), a CDR-H2 of WINTKTGEATYVEEFKG (SEQ ID NO: 295), a CDR-H3 of WDFAYYVEAMDY (SEQ ID NO: 296) or WDFAHYFQTMDY (SEQ ID NO: 297), a CDR-L1 of KASQNVGTNVA (SEQ ID NO: 298) or KASAAVGTYVA (SEQ ID NO: 299), a CDR-L2 of SASYRYS (SEQ ID NO: 300) or SASYRKR (SEQ ID NO: 301) and a CDR-L3 of HQYYTYPLFT (SEQ ID NO: 302). In some embodiments, a CEA binding domain comprises a CDR-H1 of EFGMN (SEQ ID NO: 294), a CDR-H2 of WINTKTGEATYVEEFKG (SEQ ID NO: 295), a CDR-H3 of WDFAYYVEAMDY (SEQ ID NO: 296), a CDR-L1 of KASQNVGTNVA (SEQ ID NO: 298), a CDR-L2 of SASYRYS (SEQ ID NO: 300) and a CDR-L3 of HQYYTYPLFT (SEQ ID NO: 302). In some embodiments, a CEA scFv comprises a CDR-H1 of EFGMN (SEQ ID NO: 294), a CDR-H2 of WINTKTGEATYVEEFKG (SEQ ID NO: 295), a CDR-H3 of WDFAYYVEAMDY (SEQ ID NO: 296), a CDR-L1 of KASAAVGTYVA (SEQ ID NO: 299), a CDR-L2 of SASYRKR, and a CDR-L3 of HQYYTYPLFT (SEQ ID NO: 302). In some embodiments, a CEA binding domain comprises a CDR-H1 of EFGMN (SEQ ID NO: 294), a CDR-H2 of WINTKTGEATYVEEFKG (SEQ IDNO: 295), a CDR-H3 of WDFAHYFQTMDY (SEQ ID NO: 297), a CDR-L1 of KASAAVGTYVA (SEQ ID NO: 299), a CDR-L2 of SASYRKR, and a CDR-L3 of HQYYTYPLFT (SEQ ID NO: 302).

[0198] In some embodiments, the activator ligand is CEA or a peptide antigen thereof, and the activator receptor is a CEA CAR. In some embodiments, the CEA CAR comprises sequence at least 90%, at least 95% or at least 99% identical to SEQ ID NO: 288, SEQ ID NO: 290 or SEQ ID NO: 292. In some embodiments, the CEA CAR comprises or consists essentially of SEQ ID NO: 288, SEQ ID NO: 290 or SEQ ID NO: 292. In some embodiments, the CEA CAR is encoded by a sequence comprising or consisting essentially of SEQ ID NO: 289, SEQ ID NO: 291 or SEQ ID NO: 293. In some embodiments, the CEA CAR is encoded by a sequence having at least 80% identity, at least 85% identity, at least 90% identity, at least 95% identity or at least 99% identity to SEQ ID NO: 289, SEQ ID NO: 291 or SEQ ID NO: 293.

[0199] In some embodiments, the activator ligand is EGFR or a peptide antigen thereof, and the activator ligand binding domain comprises an EGFR binding domain. In some embodiments, the EGFR ligand binding domain comprises an scFv domain. In some embodiments, the EGFR ligand binding domain comprises a sequence of SEQ ID NO: 102, SEQ ID NO: 104, SEQ ID NO: 106, SEQ ID NO: 108, SEQ ID NO: 110, SEQ ID NO: 112, SEQ ID NO: 114, SEQ ID NO: 116, SEQ ID NO: 118 or SEQ ID NO: 391. In some embodiments, the EGFR ligand binding domain comprises a sequence at least 90%, at least 95% or at least 99% identical to SEQ ID NO: 102, SEQ ID NO: 104, SEQ ID NO: 106, SEQ ID NO: 108, SEQ ID NO: 110, SEQ ID NO: 112, SEQ ID NO: 114, SEQ ID NO: 116, SEQ ID NO: 118 or SEQ ID NO: 391. In some embodiments, the EGFR ligand binding domain is encoded by a sequence comprising SEQ ID NO: 103, SEQ ID NO: 104, SEQ ID NO: 107, SEQ ID NO: 109, SEQ ID NO: 111, SEQ ID NO: 113, SEQ ID NO: 115, SEQ ID NO: 117 or SEQ ID NO: 119. In some embodiments, the EGFR ligand binding domain is encoded by a sequence having at least 80% identity, at least 85% identity, at least 90% identity, at least 95% identity or at least 99% identity to a sequence of SEQ ID NO: 103, SEQ ID NO: 104, SEQ ID NO: 107, SEQ ID NO: 109, SEQ ID NO: 111, SEQ ID NO: 113, SEQ ID NO: 115, SEQ ID NO: 117 or SEQ ID NO: 119.

[0200] In some embodiments, the activator ligand is EGFR or a peptide antigen thereof, and the activator ligand binding domain comprises an EGFR ligand binding domain. In some embodiments, the EGFR binding domain comprises a VH and/or a VL domain selected from the group disclosed in Table 6 or a sequence having at least 90% identity thereto. In some embodiments, the EGFR ligand binding domain comprises a VH domain selected from the group consisting of SEQ ID NO: 120, SEQ ID NO: 122, SEQ ID NO: 124, SEQ ID NO: 126, SEQ ID NO: 128 and SEQ ID NO: 130. In some embodiments, the EGFR ligand binding domain comprises a VH selected from the group consisting of SEQ ID NO: 120, SEQ ID NO: 122, SEQ ID NO: 124, SEQ ID NO: 126, SEQ ID NO: 128 and SEQ ID NO: 130 or a sequence having at least 90%, at least 95% or at least 99% identity thereto. In some embodiments, the EGFR ligand binding domain comprises a VL domain selected from the group consisting of SEQ ID NO: 121, SEQ ID NO: 123, SEQ ID NO: 125, SEQ ID NO: 127, SEQ ID NO: 129 and SEQ ID NO: 131. In some embodiments, the EGFR ligand binding domain comprises a VH selected from the group consisting of SEQ ID NO: 121, SEQ ID NO: 123, SEQ ID NO: 125, SEQ ID NO: 127, SEQ ID NO: 129 and SEQ ID NO: 131 or a sequence having at least 90%, at least 95% or at least 99% identity thereto.

TABLE 6
EGFR Variable Heavy (VH) and Variable Light (VL) domains

| EGFR VH | EGFR VL |
|---|---|
| CT478, CT479: | CT478, CT479: |
| QVQLVESGGGVVQPGRSLRLSCAASGFTFS | AIQLTQSPSSLSASVGDRVTITCRASQ |
| TYGMHWVRQAPGKGLEWVAVIWDDGSYK | DISSALVWYQQKPGKAPKLLIYDASS |
| YYGDSVKGRFTISRDNSKNTLYLQMNSLRA | LESGVPSRFSGSESGTDFTLTISSLQPE |
| EDTAVYYCARDGITMVRGVMKDYFDYWG | DFATYYCQQFNSYPLTFGGGTKVEIK |
| QGTLVTVSS (SEQ ID NO: 120) | (SEQ ID NO: 121) |
| CT480, CT481: | CT480, CT481: |
| QIQLVQSGPELKKPGETVKISCKASGYTFTE | DVVMTQTPLSLPVSLGDQASISCRSS |
| YPIHWVKQAPGKGFKWMGMIYTDIGKPTY | QSLVHSNGNTYLHWYLQKPGQSPKL |
| AEEFKGRFAFSLETSASTAYLQINNLKNEDT | LIYKVSNRFSGVPDRFSGSGSGTDFTL |
| ATYFCVRDRYDSLFDYWGQGTTLTVSS | KISRVEAEDLGVYFCSQSTHVPWTFG |
| (SEQ ID NO: 122) | GGTKLEIK (SEQ ID NO: 123) |
| CT482, CT483: | CT482, CT483: |
| EMQLVESGGGFVKPGGSLKLSCAASGFAFS | DVVMTQTPLSLPVSLGDQASISCRSS |
| HYDMSWVRQTPKQRLEWVAYIASGGDITY | QSLVHSNGNTYLHWYLQKPGQSPKL |
| YADTVKGRFTISRDNAQNTLYLQMSSLKSE | LIYKVSNRFSGVPDRFSGSGSGTDFTL |
| DTAMFYCSRSSYGNNGDALDFWGQGTSVT | KISRVEAEDLGVYFCSQSTHVLTFGS |
| VSS (SEQ ID NO: 124) | GTKLEIK (SEQ ID NO: 125) |
| CT486: | CT486: |
| QVQLKQSGPGLVQPSQSLSITCTVSGFSLTN | DILLTQSPVILSVSPGERVSFSCRASQS |
| YGVHWVRQSPGKGLEWLGVIWSGGNTDY | IGTNIHWYQQRTNGSPRLLIKYASESI |
| NTPFTSRLSINKDNSKSQVFFKMNSLQSNDT | SGIPSRFSGSGSGTDFTLSINSVESEDI |
| AIYYCARALTYYDYEFAYWGQGTLVTVSA | ADYYCQQNNNWPTTFGAGTKLELK |
| (SEQ ID NO: 126) | (SEQ ID NO: 127) |
| CT487: | CT487: |
| QVQLVQSGAEVKKPGASVKVSCKASGYTF | DIQMTQSPSSLSASVGDRVTITCSASS |
| TSHWMHWVRQAPGQGLEWIGEFNPSNGRT | SVTYMYWYQQKPGKAPKLLIYDTSN |
| NYNEKFKSKATMTVDTSTNTAYMELSSLRS | LASGVPSRFSGSGSGTDYTFTISSLQP |
| EDTAVYYCASRDYDYDGRYFDYWGQGTL | EDIATYYCQQWSSHIFTFGQGTKVEI |
| VTVSS (SEQ ID NO: 128) | K (SEQ ID NO: 129) |
| CT488: | CT488: |
| QVQLQESGPGLVKPSETLSLTCTVSGGSVSS | DIQMTQSPSSLSASVGDRVTITCQAS |
| GDYYWTWIRQSPGKGLEWIGHIYYSGNTN | QDISNYLNWYQQKPGKAPKLLIYDA |
| YNPSLKSRLTISIDTSKTQFSLKLSSVTAADT | SNLETGVPSRFSGSGSGTDFTFTISSL |
| AIYYCVRDRVTGAFDIWGQGTMVTVSS | QPEDIATYFCQHFDHLPLAFGGGTKV |
| (SEQ ID NO: 130) | EIK (SEQ ID NO: 131) |

[0201] In some embodiments, the activator ligand is EGFR or a peptide antigen thereof, and the activator ligand binding domain is an EGFR ligand binding domain. In some embodiments, the EGFR binding domain comprises complementarity determining region (CDRs) selected from the group of CDRs disclosed in Table 7. In some embodiments, the EGFR ligand binding domain comprises CDRs having at least 95% sequence identity to CDRs disclosed in Table 7. In some embodiments, the EGFR ligand binding domain comprises CDRs selected from SEQ ID NOs: 131-166. In some embodiments, the EGFR ligand binding domain comprises a heavy chain CDR 1 (CDR H1) selected from the group consisting of SEQ ID NOs: 132-137. In some embodiments, the EGFR ligand binding domain comprises a heavy chain CDR 2 (CDR H2) selected from the group consisting of SEQ ID NOs: 138-143. In some embodiments, the EGFR ligand binding domain comprises a heavy chain CDR 3 (CDR H3) selected from the group consisting of SEQ ID NOs: 144-149. In some embodiments, the EGFR ligand binding domain comprises a light chain CDR 1 (CDR L1) selected from the group consisting of SEQ ID NOs: 150-155. In some embodiments, the EGFR ligand binding domain comprises a light chain CDR 2 (CDR L2) selected from the group consisting of SEQ ID NOs: 156-160. In some embodiments, the EGFR ligand binding domain comprises a light chain CDR 3 (CDR L3) selected from the group consisting of SEQ ID NOs: 161-166. In some embodiments, the EGFR ligand binding domain comprises a CDR H1 selected from SEQ ID NOs: 132-137, a CDR H2 selected from SEQ ID NOs: 138-143, a CDR H3 selected from SEQ ID NOs: 144-149, a CDR L1 selected from SEQ ID NOs: 150-155, a CDR L2 selected from SEQ ID NOs: 156-160, and a CDR L3 selected from SEQ ID NOs: 156-160.

TABLE 7
EGFR antigen binding domain CDRs.

| CDR H1 | CDR H2 | CDR H3 | CDR L1 | CDR L2 | CDR L3 |
|---|---|---|---|---|---|
| TYGMH | VIWDDGSYK | DGITMVRGVM | RASQDISSAL | DASSLES | QQFNSYP |
| (SEQ ID | YYGDSVKG | KDYFDY (SEQ | V(SEQ ID | (SEQ ID | LT (SEQ |
| NO: 132) | (SEQ ID | ID NO: 144) | NO: 150) | NO: 156) | ID NO: |
| | NO: 138) | | | | 161) |
| EYPIH | MIYTDIGKPT | DRYDSLFDY | RSSQSLVHSN | KVSNRF | SQSTHVP |
| (SEQ ID | YAEEFKG | (SEQ ID NO: | GNTYLH (SEQ | S (SEQ ID | WT (SEQ |
| NO: 133) | (SEQ ID NO: | 145) | ID NO: 151) | NO: 157) | ID NO: |
| | 139) | | | | 162) |
| HYDMS | YIASGGDITY | SSYGNNGDAL | RSSQSLVHSN | KVSNRF | SQSTHVL |
| (SEQ ID | YADTVKG | DF (SEQ ID | GNTYLH (SEQ | S (SEQ ID | T (SEQ ID |
| NO: 134) | (SEQ ID NO: | NO: 146) | ID NO: 152) | NO: 157) | NO: 163) |
| | 140) | | | | |
| NYGVH | VIWSGGNTD | ALTYYDYEFA | RASQSIGTNI | YASESIS | QQNNNW |
| (SEQ ID | YNTPFTS | Y (SEQ ID | H (SEQ ID | (SEQ ID | PTT (SEQ |
| NO: 135) | (SEQ ID NO: | NO: 147) | NO: 153) | NO: 158) | ID NO: |
| | 141) | | | | 164) |
| SHWMH | EFNPSNGRT | RDYDYDGRYF | SASSSVTYMY | DTSNLAS | QQWSSHI |
| (SEQ ID | NYNEKFKS | DY (SEQ ID | (SEQ ID | (SEQ ID | FT (SEQ |
| NO: 136) | (SEQ ID NO: | NO: 148) | NO: 154) | NO: 159) | ID NO: |
| | 142) | | | | 165) |
| SGDYY | HIYYSGNTN | DRVTGAFDI | QASQDISNYL | DASNLE | QHFDHLP |
| WT (SEQ | YNPSLKS | (SEQ ID NO: | N (SEQ ID | T (SEQ | LA (SEQ |
| ID NO: | (SEQ ID NO: | 149) | NO: 155) | ID NO: | ID NO: |
| 137) | 143) | | | 160) | 166) |

[0202] In some embodiments, the activator ligand is mesothelin (MSLN) or a peptide antigen thereof, and the activator ligand binding domain is an mesothelin ligand binding domain. Examples of mesothelin ligand binding domains are described, for example, in International Patent Application No. PCT/US2021/046751 which is incorporated herein in its entirety for examples of mesothelin ligand binging domains that may be used in the compositions and methods described herein. In some embodiments, the mesothelin ligand binding domain comprises an scFv. In some embodiments the mesothelin ligand binding domain is an scFv comprising a sequence that is least 90%, at least 95%, at least 98%, or at least 99% identical to the sequence set forth in any one of SEQ ID NOs: 5057-5119. In some embodiments the mesothelin ligand binding domain is an scFv comprising the sequence set forth in any one of SEQ ID NOs: 5057-5119.

[0203] In some embodiments, the mesothelin ligand binding domain comprises a VH CDR 1 selected from the group consisting of SEQ ID NOs: 5120-5140. In some embodiments, the mesothelin ligand binding domain comprises a VH CDR2 selected from the group consisting of SEQ ID NOs: 5141-5161. In some embodiments, the mesothelin ligand binding domain comprises a VH CDR3 selected from the group consisting of SEQ ID NOs: 5162-5225. In some embodiments, the mesothelin ligand binding domain comprises a VL CDR1 selected from the group consisting of SEQ ID NOs: 5226-5230. In some embodiments, the mesothelin ligand binding domain comprises a VL CDR2 selected from the group consisting of SEQ ID NOs: 152, 51231 and 5232. In some embodiments, the mesothelin ligand binding domain comprises a VL CDR3 selected from the group consisting of SEQ ID NOs: 157, 5233, 5234, and 5235.

[0204] In some embodiments, the mesothelin ligand binding domain comprises a VH CDR 1 selected from the group consisting of SEQ ID NOs: 5120-5140; a VH CDR2 selected from the group consisting of SEQ ID NOs: 5141-5161; a VH CDR3 selected from the group consisting of SEQ ID NOs: 5162-5225; a VL CDR1 selected from the group consisting of SEQ ID NOs: 5226-5230; a VL CDR2 selected from the group consisting of SEQ ID NOs: 152, 5231 and 5232; and a VL CDR3 selected from the group consisting of SEQ ID NOs: 157, 5233, 5234, and 5235.

[0205] In some embodiments, the activator ligand is a pan-HLA ligand, and the activator binding domain is a pan-HLA binding domain, i.e. a binding domain that binds to and recognizes an antigenic determinant shared among products of the HLA A, B and C loci. Various single variable domains known in the art or disclosed herein are suitable for use in embodiments. Such scFvs include, for example and without limitation, the following mouse and humanized pan-HLA scFv antibodies. An exemplary pan-HLA ligand is W6/32, which recognizes a conformational epitope, reacting with HLA class I alpha3 and alpha2 domains. Illustrative pan-HLA scFv binding domains derived from W6/32 are shown in Table 8.

TABLE 8
Illustrative pan-HLA scFv binding domains derived from W6/32

| | Polynucleotide |
|---|---|
| Protein Sequence | Sequence |
| C-002170 W632 scFv (mouse): | C-002170 W632 |
| QVQLKQSGPGLVQPSQSLSLTCTVSGFSLTSYGVHWVRQPPGKGL | scFv (mouse) |
| EWLGVIWSGGSTDYNAAFISRLSIRKDNSKSQVFFKMNSLQADDT | SEQ ID NO: 168 |
| AIYYCARTFTTSTSAWFAYWGQGTLVTVSAGGGGSGGGGSGGGG | |
| SGGSIVMTQTPKFLLVSAGDRVTITCKASQSVSNDVAWYQQKPG | |
| QSPICLLIYYASNRYTGVPDRFTGSGYGTDFTFTISTVQAEDLAVY | |
| FCQQDYSSPPWTFGGGTKLEIR (SEQ ID NO: 167) | |
| C-002171 W632.1 scFv (humanized): | C-002171 |
| QVQLQESGPGLVKPSQTLSLTCTVSGFSLTSYGVHWIRQPPGKGLE | W632.1 scFv |
| WIGVIWSGGSTDYNAAFISRVTISVDTSKNQFSLKLSSVTAADTAV | (humanized) |
| YYCARTFTTSTSAWFAYWGQGTLVTVSSGGGGSGGGGSGGGGS | SEQ ID NO: 170 |
| GGDIVMTQSPDSLAVSLGERATINCKASQSVSNDVAWYQQKPGQ | |
| PPKLLIYYASNRYTGVPDRFSGSGSGTDFTLTISSLQAEDVAVYYC | |
| QQDYSSPPWTFGGGTKVEIK (SEQ ID NO: 169) | |
| C-002172 W632.2 scFv (humanized): | C-002172 |
| EVQLLESGGGLVQPGGSLRLSCAASGFSLTSYGVHWVRQAPGKG | W632.2 scFv |
| LEWVSVIWSGGSTDYNAAFISRFTISRDNSKNTLYLQMNSLRAED | (humanized) |
| TAVYYCARTFTTSTSAWFAYWGQGTLVTVSSGGGGSGGGGSGG | SEQ ID NO: 172 |
| GGSGGDIQMTQSPSSLSASVGDRVTITCKASQSVSNDVAWYQQKP | |
| GKAPKLLIYYASNRYTGVPSRFSGSGSGTDFTFTISSLQPEDIATYY | |
| CQQDYSSPPWTFGGGTKVEIK (SEQ ID NO: 171) | |
| C-002173 W632.3 scFv (humanized): | C-002173 |
| QVQLQESGPGLVKPSETLSLTCTVSGFSLTSYGVHWIRQPPGKGLE | W632.3 scFv |
| WIGVIWSGGSTDYNAAFISRVTISRDTSKNQFSLKLSSVTAADTAV | (humanized) |
| YYCARTFTTSTSAWFAYWGQGTLVTVSSGGGGSGGGGSGGGGS | SEQ ID NO: 174 |
| GGDIVMTQTPLSLSVTPGQPASISCKASQSVSNDVAWYLQKPGQS | |
| PQLLIYYASNRYTGVPDRFSGSGSGTDFTLKISRVEAEDVGVYYC | |
| QQDYSSPPWTFGGGTKVEIK (SEQ ID NO: 173) | |
| C-002174 W632.5 scFv (humanized): | C-002174 |
| QVQLVESGGGVVQPGRSLRLSCAVSGFSLTSYGMHWVRQAPGKG | W632.5 scFv |
| LEWVAVIWSGGSTDYNAAFISRFTISRDNSKNTLYLQMNSLRAED | (humanized) |
| TAVYYCAKTFTTSTSAWFAYWGQGTLVTVSSGGGGSGGGGSGG | SEQ ID NO: 176 |
| GGSGGEIVLTQSPATLSLSPGERATLSCRASQSVSNDLAWYQQKP | |
| GQAPRLLIYYASNRYTGVPDRFSGSGSGTDFTLTISSLEPEDFAVY | |
| YCQQDYSSPPWTFGQGTKVEIK (SEQ ID NO: 175) | |
| C-002175 W632.6 scFv (humanized): | C-002175 |
| QVQLVESGGGVVQPGRSLRLSCAVSGFSLTSYGMHWVRQAPGKG | W632.6 scFv |
| LEWVAVIWSGGSTDYNAAFISRFTISRDNSKNTLYLQMNSLRAED | (humanized) |
| TAVYYCARTFTTSTSAWFAYWGQGTLVTVSSGGGGSGGGGSGG | SEQ ID NO: 178 |
| GGSGGDIQMTQSPSSLSASVGDRVTITCQASQSVSNDLNWYQQKP | |
| GKAPKLLIYYASNRYTGVPDRFSGSGSGTDFTFTISSLQPEDIATYY | |
| CQQDYSSPPWTFGGGTKVEIK (SEQ ID NO: 177) | |

[0206] In some embodiments, the activator ligand is pan-HLA ligand, and the activator ligand binding domain comprises a pan-HLA ligand binding domain. In some embodiments, the pan-HLA ligand binding domain comprises an scFv domain. In some embodiments, the pan-HLA ligand binding domain comprises a sequence of SEQ ID NO: 167, SEQ ID NO: 169, SEQ ID NO: 171, SEQ ID NO: 173, SEQ ID NO: 175, or SEQ ID NO: 177. In some embodiments, the pan-HLA ligand binding domain comprises a sequence at least 90%, at least 95% or at least 99% identical to SEQ ID NO: 167, SEQ ID NO: 169, SEQ ID NO: 171, SEQ ID NO: 173, SEQ ID NO: 175, or SEQ ID NO: 177. In some embodiments, the pan-HLA ligand binding domain is encoded by a sequence comprising SEQ ID NO: 168, SEQ ID NO: 170, SEQ ID NO: 172, SEQ ID NO: 174, SEQ ID NO: 176, or SEQ ID NO: 178. In some embodiments, the pan-HLA ligand binding domain is encoded by a sequence having at least 80% identity, at least 85% identity, at least 90% identity, at least 95% identity or at least 99% identity to a sequence of SEQ ID NO: 168, SEQ ID NO: 170, SEQ ID NO: 172, SEQ ID NO: 174, SEQ ID NO: 176, or SEQ ID NO: 178.

[0207] In some embodiments, the activator ligand is CD19 molecule (CD19) or a peptide antigen thereof, and the activator ligand binding domain comprises a CD19 ligand binding domain. In some embodiments, the CD19 ligand binding domain comprises an scFv domain. In some embodiments, the CD19 ligand binding domain comprises a sequence at least 90%, at least 95% or at least 99% identical to SEQ ID NO: 275 or SEQ ID NO: 277. In some embodiments, the CD19 ligand binding domain comprises a sequence of SEQ ID NO: 275 or SEQ ID NO: 277. In some embodiments, the CD19 ligand binding domain is encoded by a sequence comprising SEQ ID NO: 276, or SEQ ID NO: 278. In some embodiments, the CD19 ligand binding domain is encoded by a sequence having at least 80% identity, at least 85% identity, at least 90% identity, at least 95% identity or at least 99% identity to a sequence of SEQ ID NO: 276 or SEQ ID NO: 278.

[0208] In some embodiments, activator ligand is CD19 molecule (CD19) or a peptide antigen thereof, and the activator receptor is a CAR. In some embodiments, the CD19 CAR comprises a sequence at least 90%, at least 95% or at least 99% identical to SEQ ID NO: 279 or SEQ ID NO: 281. In some embodiments, the CD19 CAR comprises or consists essentially of SEQ ID NO: 279 or SEQ ID NO: 281. In some embodiments, the CD19 CAR is encoded by a sequence having at least 80% identity, at least 85% identity, at least 90% identity, at least 95% identity or at least 99% identity to a sequence of SEQ ID NO: 280 or SEQ ID NO: 390. In some embodiments, the CD19 CAR is encoded by a sequence comprising or consisting essentially of SEQ ID NO: 280 or SEQ ID NO: 390.It will be appreciated by the person of ordinary skill that first, activator ligand binding domains for the first receptor may be isolated or derived from any source known in the art, including, but not limited to, art recognized T cell receptors, chimeric antigen receptors and antibody binding domains. For example, the first ligand binding domain may be derived from any of the antibodies disclosed in Table 9, and bind to a first ligand selected from the antigens described in Table 9. Accordingly, the immune cells comprising the two receptor system described can be used to treat any of the diseases or disorders described in Table 9. Selection of an appropriate first, activator receptor ligand binding domain to treat any the cancers described herein will be apparent to those of skill in the art.

TABLE 9
Exemplary Antibodies

| | | Exemplary Diseases |
|---|---|---|
| Antigen | Antibody | and Disorders |
| TNF receptor | Urelumab, Utomilumab | cancer, diffuse large B-cell |
| superfamily member 9 | | lymphoma |
| (4-1BB, CD137) | | |
| 5′-nucelotidase | Oleclumab | pancreatic and colorectal cancer |
| trophoblast glycoprotein | Naptumomab | non-small cell lung carcinoma, |
| (5T4) | | renal cell carcinoma |
| activin receptor-like | Ascrinvacumab | cancer |
| kinase 1 | | |
| alpha-fetoprotein | Tacatuzumab | cancer |
| angiopoietin 2 | Nesvacumab, Vanucizumab | cancer |
| TNF superfamily | Belimumab, Tabalumab, | cancers and autoimmune |
| member 13b (BAFF) | Tibulizumab | disorders |
| TNF receptor | Belantamab | multiple myeloma |
| superfamily member 17 | | |
| (BCMA) | | |
| mucin 16, cell surface | Igovomab, Oregovomab, | ovarian cancer |
| associated (CA-125) | Sofituzumab | |
| C-C motif chemokine | Mogamulizumab | adult T-cell leukemia/lymphoma |
| receptor 4 (CCR4) | | |
| interleukin 3 receptor | Talacotuzumab | leukemia |
| subunit alpha (CD123) | | |
| TNF receptor | Tavolimab, Vonlerolizumab | cancer |
| superfamily member 4 | | |
| (CD134) | | |
| cytotoxic T-lymphocyte | Ipilimumab | melanoma |
| associated protein 4 | | |
| (CD152) | | |
| CD19 molecule (CD19) | Duvortuxizumab, | cancer |
| | Blinatumomab, Coltuximab, | |
| | Denintuzumab, Inebilizumab, | |
| | Loncastuximab, Taplitumomab | |
| membrane spanning 4- | Ibritumomab, Obinutuzumab, | cancers, multiple sclerosis, |
| domains A1 (CD20) | Ocaratuzumab, Ocrelizumab, | autoimmune disorders |
| | Ofatumumab, Rituximab, | |
| | Tositumomab, Veltuzumab | |
| CD200 molecule (CD200) | Samalizumab | cancer |
| CD22 molecule (CD22) | Bectumomab, Epratuzumab, | cancer |
| | Inotuzumab, Moxetumomab, | |
| | Pinatuzumab | |
| Fc fragment of IgE | Gomiliximab, Lumiliximab | chronic lymphocytic leukemia |
| receptor II (CD23, IgE | | |
| receptor) | | |
| interleukin 2 receptor | Camidanlumab, Basiliximab, | leukemias and lymphomas |
| subunit alpha (CD25) | Inolimomab, Daclizumab | |
| CD27 molecule (CD27) | Varlilumab | solid tumors and hematologic |
| | | malignancies |
| CD276 molecule (CD276) | Enobiltuzumab, Omburtamab | cancer |
| TNF receptor | Brentuximab, Iratumumab | Hodgkin’s lymphoma |
| superfamily member 8 | | |
| (CD30, TNFRSF8) | | |
| CD33 molecule (CD33) | Gemtuzumab, Lintuzumab, | acute myelogenous leukemia |
| | Vadastuximab | |
| CD37 moleule (CD37) | Lilotomab, Otlertuzumab, | cancer |
| | Tetulomab | |
| CD38 molecule (CD38) | Daratumumab, Isatuximab | multiple myeloma |
| CD44 molecule v6 | Bivatuzumab | squamous cell carcinoma |
| (CD44 v6) | | |
| integrin subunit alpha V | Abituzumab, Intetumumab | cancer |
| (CD51) | | |
| neural cell adhesion | Lorvotuzumab | cancer |
| molecule 1 (CD56) | | |
| CD6 molecule (CD6) | Itolizumab | psoriasis |
| CD70 molecule (CD70) | Cusatuzumab, Vorsetuzumab | cancer |
| CD74 molecule (CD74) | Milatuzumab | hematological malignancies |
| CD79B molecule | Polatuzumab, Iladatuzumab | Hematological cancers |
| (CD79B) | | |
| CD80 molecule (CD80) | Galiximab | B-cell lymphoma |
| CEA cell adhesion | Altumomab, Arcitumomab, | cancer, colorectal cancer |
| molecule 5 (CEA) | Labetuzumab, Cibisatamab | |
| Claudin 18 Isoform 2 | Zolbetuximab | gastric cancer |
| Colony stimulating | Lacnotuzumab | cancer |
| factor 1 (CSF1) | | |
| colony stimulating | Cabiralizumab, Emactuzumab | cancer |
| factor 1 receptor (CSF1R) | | |
| Colony stimulating | Gimsilumab, Lenzilumab, | leukemias |
| factor 2 (CSF2) | Otilimab, Mavrilimumab | |
| cytotoxic T-lymphocyte | Tremelimumab | non-small cell lung, head & |
| associated protein 4 | | neck, urothelial cancer |
| (CTLA-4) | | |
| CXCR4 (CD184) | Ulocuplumab | hematologic malignancies |
| dendritic cell-associated | Tepoditamab | cancer |
| lectin 2 | | |
| delta like canonical | Rovalpituzumab | small cell lung cancer |
| Notch ligand 3 (DLL3) | | |
| delta like canonical | Demcizumab | cancer |
| Notch ligand 4 (DLL4) | | |
| TNF receptor | Drozitumab | cancer |
| superfamily member 10b | | |
| (DR5) | | |
| EGF like domain | Parsatuzumab | cancer |
| multiple 7 (EGFL7) | | |
| epidermal growth factor | Cetuximab, Depatuxizumab, | cancer |
| receptor (EGFR) | Futuximab, Imgatuzumab, | |
| | Laprituximab, Matuzumab, | |
| | Necitumumab, Nimotuzumab, | |
| | Panitumumab, Zalutumumab, | |
| | Modotuximab, Amivantamab, | |
| | Tomuzotuximab, Losatuxizumab | |
| epithelial cell adhesion | Adecatumumab, Citatuzumab, | cancer |
| molecule (EpCAM) | Edrecolomab, Oportuzumab, | |
| | Solitomab, Tucotuzumab, | |
| | Catumaxomab | |
| EPH receptor A3 (EPHA3) | Ifabotuzumab | glioblastoma multiforme |
| erb-b2 receptor tyrosine | Duligotuzumab, Elgemtumab, | cancer |
| kinase 3 (ERBB3, | Lumretuzumab, Patritumab, | |
| HER3) | Seribantumab, Zenocutuzumab | |
| fibroblast growth factor | Aprutumab, Bemarituzumab | cancer |
| receptor (FGFR2) | | |
| Frizzled receptor | Vantictumab | cancer |
| GD2 ganglioside | Dinutuximab | neuroblastoma |
| GD3 ganglioside | Ecromeximab | malignant melanoma |
| GD3 ganglioside | Mitumomab | small cell lung carcinoma |
| glypican 3 | Codrituzumab | cancer |
| glycoprotein nmb | Glembatumumab | malanoma, breast cancer |
| (GPNMB) | | |
| epidermal growth factor | Zatuximab | cancer |
| receptor (HER1) | | |
| erb-b2 receptor tyrosine | Ertumaxomab, Margetuximab, | cancer, breast cancer |
| kinase 2 (HER2) | Timigutuzumab, Gancotamab, | |
| | Pertuzumab, Trastuzumab | |
| hepatocyte growth | Ficlatuzumab, Rilotumumab | cancer |
| factor (HGF) | | |
| MET proto-oncogene, | Telisotuzumab, Emibetuzumab | cancer |
| receptor tyrosine kinase | | |
| (HGFR) | | |
| IGF-1 receptor (CD221) | Cixutumumab, Dalotuzumab, | cancer |
| | Figitumumab, Ganitumab, | |
| | Robatumumab, Teprotumumab | |
| Interleukin 3 receptor | Flotetuzumab | hematological malignancies |
| Interleukin 1 alpha | Bermekimab | colorectal cancer |
| (IL1A) | | |
| Interleukin 2 (IL2) | Cergutuzumab | cancer |
| integrin α5β1 | Volociximab | solid tumors |
| integrin αᵥβ3 | Etaracizumab | melanoma, prostate cancer, |
| | | ovarian cancer |
| lymphocyte activating 3 | Relatlimab | melanoma |
| (LAG3) | | |
| C-C motif chemokine | Carlumab | cancer |
| ligand 2 (MCP-1) | | |
| mesothelin | Amatuximab | cancer |
| Mucin 1 | Clivatuzumab, Gatipotuzumab, | cancer |
| | Pemtumomab, Cantuzumab, | |
| | Pankomab | |
| NGNA ganglioside | Racotumomab | non-small cell lung cancer |
| Notch 1 | Brontictuzumab | cancer |
| Notch receptor | Tarextumab | cancer |
| neuropilin 1 (NRP1) | Vesencumab | cancer |
| programmed cell death 1 | Camrelizumab, Cetrelimab, | cancer |
| (PD-1) | Nivolumab, Pembrolizumab, | |
| | Pidilizumab, Cemiplimab, | |
| | Spartalizumab | |
| CD274 moleclue (PD-L1) | Atezolizumab, Avelumab, | cancer |
| | Durvalumab | |
| receptor tyrosine kinase | Cirmtuzumab | leukemia |
| like orphan receptor 1 | | |
| (ROR1) | | |
| tenascin C | Tenatumomab | cancer |
| transforming growth | Fresolimumab | cancer |
| factor beta (TGF-β) | | |
| VEGF-A | Brolucizumab, Bevacizumab, | cancer |
| | Ranibizumab, Varisacumab, | |
| | Faricimab | |
| VEGFR-1 | Icrucumab | cancer |
| VEGFR2 | Alacizumab, Ramucirumab | cancer |

### Inhibitors

[0209] The disclosure provides a second ligand, an inhibitor, and a second engineered receptor comprising a second ligand binding domain that binds to the inhibitor ligand.

[0210] The disclosure provides a second engineered receptor comprising an extracellular region, the extracellular region comprising a second ligand binding domain capable of specifically binding to a second ligand that inhibits activation of effector cells expressing the first and second receptors, wherein the effector cells are activated by binding of the first ligand to the first engineered receptor.

[0211] As used herein an “inhibitor” or “inhibitor ligand,” sometimes called a “blocker,” refers to a second ligand that binds to a second, ligand binding domain (inhibitor LBD) of an engineered receptor of the disclosure, but inhibits activation of an immune cell expressing the engineered receptor. The inhibitor is not expressed by the target cells. The inhibitor ligand is also expressed in a plurality of normal, non-target cells, including normal, non-target cells that express the activator ligand, thereby protecting these cells from the cytotoxic effects of the adoptive cell therapy. Without wishing to be bound by theory, inhibitor ligands can block activation of the effector cells through a variety of mechanisms. For example, binding of the inhibitor ligand to the inhibitor LBD can block transmission of a signal that occurs upon binding of the activator ligand to the activator LBD that would, in the absence of the inhibitor, lead to activation of the immune cell expressing the engineered receptors described herein.

[0212] Alternatively, or in addition, binding of the inhibitor ligand to the second engineered receptor can cause loss of cell surface expression the first, activator receptor from the surface of the immune cells comprising the two receptor system described herein. Without wishing to be bound by theory, it is thought that immune cell engagement of activator and inhibitor ligands on normal cells causes the inhibitor receptor to cause removal of nearby activator receptor molecules from the immune cell surface. This process locally desensitizes the immune cell, reversibly raising its activation threshold. Immune cells that engage only the activator ligand on a target cell cause local activation signals which are unimpeded by signals from the second, inhibitory receptor. This local activation increases until release of cytotoxic granules leads to target cell selective cell death. However, modulation of surface receptor expression levels may not be the only mechanism by which blocker receptors inhibit activation of immune cells by the first activator receptor. Without wishing to be bound by theory, other mechanisms may come into play, including, but not limited to, cross-talk between activator and blocker receptor signaling pathways.

[0213] In some embodiments, the second ligand is not expressed by the target cells, and is expressed by the non-target cells. In some embodiments, the target cells are cancer cells and the non-target cells are non-cancerous cells.

[0214] In some embodiments, the second, inhibitor ligand binding domain comprises an scFv domain.

[0215] In some embodiments, the second, inhibitor ligand binding domain comprises a Vβ-only ligand binding domain.

[0216] In some embodiments, the second, inhibitor ligand binding domain comprises an antigen binding domain isolated or derived from a T cell receptor (TCR). For example, the second, inhibitor ligand binding domain comprises TCR α and β chain variable domains.

### Inhibitor Targets

[0217] In some embodiments, the inhibitor ligand comprises a gene with high, homogeneous surface expression across tissues, or a peptide antigen thereof. Without wishing to be bound by theory, high, homogeneous surface expression across tissues allows the inhibitor ligand to deliver a large, even inhibitory signal. Alternatively, or in addition, expression of activator and inhibitor targets may be correlated, i.e. the two are expressed at similar levels on non-target cells.

[0218] In some embodiments, the second, inhibitor ligand is a peptide ligand. In some embodiments, the second, inhibitor ligand is a peptide antigen complexed with a major histocompatibility (MHC) class I complex (peptide MHC, or pMHC). Inhibitor ligands comprising peptide antigens complexed with pMHC comprising any of HLA-A, HLA-B or HLA-C are envisaged as within the scope of the disclosure.

[0219] In some embodiment, the inhibitor ligand is encoded by a gene that is absent or polymorphic in many tumors.

[0220] Methods of distinguishing the differential expression of inhibitor ligands between target and non-target cells will be readily apparent to the person or ordinary skill in the art. For example, the presence or absence of inhibitor ligands in non-target and target cells can be assayed by immunohistochemistry with an antibody that binds to the inhibitor ligand, followed by microscopy or FACS, RNA expression profiling of target cells and non-target cells, or DNA sequencing of non-target and target cells to determine if the genomic locus of the inhibitor ligand comprises mutations in either the target or non-target cells.

### Alleles Lost Due to Loss of Heterozygosity (LOH)

[0221] Homozygous deletions in primary tumors are rare and small, and therefore unlikely to yield target B candidates. For example, in an analysis of 2218 primary tumors across 21 human cancer types, the top four candidates were cyclin dependent kinase inhibitor 2A (CDKN2A), RB transcriptional corepressor 1 (RB 1), phosphatase and tensin homolog (PTEN) and N3PB2. However, CDKN2A (P16) was deleted in only 5% homozygous deletion across all cancers. Homozygous HLA-A deletions were found in less than 0.2% of cancers (Cheng et al., Nature Comm. 8:1221 (2017)). In contrast, deletion of a single copy of a gene in cancer cells due to loss of hemizygosity occurs far more frequently.

[0222] In some embodiments, the second, inhibitor ligand comprises an allele of a gene that is lost in target cells due to loss of heterozygosity. In some embodiments, the target cells comprises cancer cells. Cancer cells undergo frequent genome rearrangements, including duplication and deletions. These deletions can lead to the deletion of one copy of one or more genes in the cancer cells.

[0223] As used herein, “loss of heterozygosity (LOH)” refers to a genetic change that occurs at high frequency in cancers, whereby one of the two alleles is deleted, leaving a single mono-allelic (hemizygous) locus.

### HLA Class I Alleles

[0224] In some embodiments, the second, inhibitor ligand comprises an HLA class I allele. The major histocompatibility complex (MHC) class I is a protein complex that displays antigens to cells of the immune system, triggering immune response. The Human Leukocyte Antigens (HLAs) corresponding to MEW class I are HLA-A, HLA-B and HLA-C.

[0225] In some embodiments, the second, inhibitor ligand comprises an HLA class I allele. In some embodiments, the second, inhibitor ligand comprises an allele of HLA class I that is lost in a target cell through LOH. HLA-A is a group of human leukocyte antigens (HLA) of the major histocompatibility complex (MHC) that are encoded by the HLA-A locus. HLA-A is one of three major types of human MHC class I cell surface receptors. The receptor is a heterodimer comprising a heavy α chain and smaller β chain. The α chain is encoded by a variant of HLA-A, while the β chain (β2-microglobulin) is invariant. There are several thousand HLA-A variants, all of which fall within the scope of the instant disclosure.

[0226] In some embodiments, the second, inhibitor ligand comprises an HLA-B allele. The HLA-B gene has many possible variations (alleles). Hundreds of versions (alleles) of the HLA-B gene are known, each of which is given a particular number (such as HLA-B27).

[0227] In some embodiments, the second, inhibitor ligand comprises an HLA-C allele. HLA-C belongs to the HLA class I heavy chain paralogues. This class I molecule is a heterodimer consisting of a heavy chain and a light chain (beta-2 microglobulin). Over one hundred HLA-C alleles have been described.

[0228] In some embodiments, the HLA class I allele has broad or ubiquitous RNA expression.

[0229] In some embodiments, the HLA class I allele has a known, or generally high minor allele frequency.

[0230] In some embodiments, the HLA class I allele does not require a peptide-MHC antigen, for example when the HLA class I allele is recognized by a pan-HLA ligand binding domain.

[0231] In some embodiments, the second inhibitor ligand comprises an HLA-A allele. In some embodiments the HLA-A allele comprises HLA-A*02. Various single variable domains known in the art or disclosed herein that bind to and recognize HLA-A*02 are suitable for use in embodiments. Such scFvs include, for example and without limitation, the following mouse and humanized scFv antibodies that bind HLA-A*02 in a peptide-independent way shown in Table 10 below (complementarity determining regions underlined):

TABLE 10
HLA-A*02 scFv binding domains

HLA-A*02 antigen binding domains derived from PA2.1 mAb

| | |
|---|---|
| C-001765 PA2.1 scFv (mouse): | C-001765 PA2.1 |
| DVLMTQTPLSLPVSLGDQASISCRSSQSIVHSNGNTYLEWYLQKPG | scFv (mouse) |
| QSPKLLIYKVSNRFSGVPDRFSGSGSGTDFTLKISRVEAEDLGVYYC | DNA Sequence: |
| FQGSHVPRTSGGGTKLEIKGGGGSGGGGSGGGGSGGQVQLQQSGP | SEQ ID NO: 179 |
| ELVKPGASVRISCKASGYTFTSYHIHWVKQRPGQGLEWIGWIYPGN | |
| VNTEYNEKFKGKATLTADKSSSTAYMHLSSLTSEDSAVYFCAREEI | |
| TYAMDYWGQGTSVTVSS (SEQ ID NO: 53) | |
| C-002159 PA2.1.8 scFv (humanized): | C-002159 |
| QVQLVQSGAEVKKPGSSVKVSCKASGYTFTSYHIHWVRQAPGQGL | PA2.1.8 scFv |
| EWMGWIYPGNVNTEYNEKFKGKATITADKSTSTAYMELSSLRSED | (humanized) |
| TAVYYCAREEITYAMDYWGQGTTVTVSSGGGGSGGGGSGGGGSGG | DNA Sequence: |
| EIVLTQSPGTLSLSPGERATLSCRSSQSIVHSNGNTYLEWYQQKP | SEQ ID NO: 180 |
| GQAPRLLIYKVSNRFSGIPDRFSGSGSGTDFTLTISRLEPEDFAV | |
| YYCFQGSHVPRTFGGGTKVEIK (SEQ ID NO: 54) | |
| C-002160 PA2.1.9 scFv (humanized): | C-002160 |
| QVQLVQSGAEVKKPGSSVKVSCKASGYTFTSYHIHWVRQAPGQGL | PA2.1.9 scFv |
| EWMGWIYPGNVNTEYNEKFKGKATITADKSTSTAYMELSSLRSED | (humanized) |
| TAVYYCAREEITYAMDYWGQGTTVTVSSGGGGSGGGGSGGGGSG | DNA Sequence: |
| GDIVMTQTPLSLPVTPGEPASISCRSSQSIVHSNGNTYLEWYLQKPG | SEQ ID NO: 181 |
| QSPQLLIYKVSNRFSGVPDRFSGSGSGTDFTLKISRVEAEDVGVYYC | |
| FQGSHVPRTFGGGTKVEIK | |
| (SEQ ID NO: 55) | |
| C-002161 PA2.1.10 scFv (humanized): | C-002161 |
| EVQLVESGGGLVKPGGSLRLSCAASGYTFTSYHIHWVRQAPGKGL | PA2.1.10 scFv |
| EWVGWIYPGNVNTEYNEKFKGRFTISRDDSKNTLYLQMNSLKTED | (humanized) |
| TAVYYCAREEITYAMDYWGQGTTVTVSSGGGGSGGGGSGGGGSG | DNA Sequence: |
| GDIQMTQSPSSLSASVGDRVTITCRSSQSIVHSNGNTYLEWYQQKP | SEQ ID NO: 182 |
| GKAPKLLIYKVSNRFSGVPSRFSGSGSGTDFTLTISSLQPEDFATYY | |
| CFQGSHVPRTFGGGTKVEIK | |
| (SEQ ID NO: 56) | |
| C-002162 PA2.1.14 scFv (humanized): | C-002162 |
| QVQLVQSGAEVKKPGSSVKVSCKASGYTFTSYHIHWVRQAPGQGL | PA2.1.14 scFv |
| EWIGWIYPGNVNTEYNEKFKGKATITADESTNTAYMELSSLRSEDT | (humanized) |
| AVYYCAREEITYAMDYWGQGTLVTVSSGGGGSGGGGSGGGGSGG | DNA Sequence: |
| DIQMTQSPSTLSASVGDRVTITCRSSQSIVHSNGNTYLEWYQQKPG | SEQ ID NO: 183 |
| KAPKLLIYKVSNRFSGVPARFSGSGSGTEFTLTISSLQPDDFATYYC | |
| FQGSHVPRTFGQGTKVEVK (SEQ ID NO: 57) | |
| C-002163 PA2.1.18 scFv (humanized): | C-002163 |
| QVQLVQSGAEVKKPGSSVKVSCKASGYTFTSYHMHWVRQAPGQG | PA2.1.18 scFv |
| LEWIGYIYPGNVNTEYNEKFKGKATLTADKSTNTAYMELSSLRSE | (humanized) |
| DTAVYFCAREEITYAMDYWGQGTLVTVSSGGGGSGGGGSGGGGS | DNA Sequence: |
| GGDVQMTQSPSTLSASVGDRVTITCSSSQSIVHSNGNTYMEWYQQ | SEQ ID NO: 184 |
| KPGKAPKLLIYKVSNRFSGVPDRFSGSGSGTEFTLTISSLQPDDFAT | |
| YYCHQGSHVPRTFGQGTKVEVK (SEQ ID NO: 58) | |

HLA-A*02 antigen binding domains derived from BB7.2 mAb

| | |
|---|---|
| C-002164 BB7.2 scFv (mouse): | C-002164 BB7.2 |
| QVQLQQSGPELVKPGASVKMSCKASGYTFTSYHIQWVKQRPGQG | scFv (mouse) |
| LEWIGWIYPGDGSTQYNEKFKGKTTLTADKSSSTAYMLLSSLTSED | DNA Sequence: |
| SAIYFCAREGTYYAMDYWGQGTSVTVSSGGGGSGGGGSGGGGSG | SEQ ID NO: 185 |
| GDVLMTQTPLSLPVSLGDQVSISCRSSQSIVHSNGNTYLEWYLQKP | |
| GQSPKLLIYKVSNRFSGVPDRFSGSGSGTDFTLKISRVEAEDLGVYY | |
| CFQGSHVPRTFGGGTKLEIK (SEQ ID NO: 59) | |
| C-002165 BB7.2.1 scFv (humanized): | C-002165 |
| QLQLQESGPGLVKPSETLSLTCTVSGYTFTSYHIQWIRQPPGKGLE | BB7.2.1 scFv |
| WIGWIYPGDGSTQYNEKFKGRATISVDTSKNQFSLNLDSVSAADTA | (humanized) |
| IYYCAREGTYYAMDYWGKGSTVTVSSGGGGSGGGGSGGGGSGGDIQ | DNA Sequence: |
| MTQSPSSLSASVGDRVTITCRSSQSIVHSNGNTYLEWYQQKPGKAP | SEQ ID NO: 186 |
| KLLIYKVSNRFSGVPSRFSGSGSGTDFTFTISSLQPEDIATYYC | |
| FQGSHVPRTFGPGTKVDIK (SEQ ID NO: 60) | |
| C-002166 BB7.2.2 scFv (humanized): | C-002166 |
| EVQLVQSGAELKKPGSSVKVSCKASGYTFTSYHIQWVKQAPGQGL | BB7.2.2 scFv |
| EWIGWIYPGDGSTQYNEKFKGKATLTVDKSTNTAYMELSSLRSED | (humanized) |
| TAVYYCAREGTYYAMDYWGQGTLVTVSSGGGGSGGGGSGGGGS | |
| GGDIQMTQSPSTLSASVGDRVTITCRSSQSIVHSNGNTYLEWYQQK | DNA Sequence: |
| PGKAPKLLIYKVSNRFSGVPSRFSGSGSGTDFTLTISSLQPDDFATY | SEQ ID NO: 187 |
| YCFQGSHVPRTFGQGTKVEVK (SEQ ID NO: 61) | |
| C-002167 BB7.2.3 scFv (humanized): | C-002167 |
| QVQLVQSGAEVKKPGSSVKVSCKASGYTFTSYHIQWVRQAPGQGL | BB7.2.3 scFv |
| EWMGWIYPGDGSTQYNEKFKGRVTITADKSTSTAYMELSSLRSED | (humanized) |
| TAVYYCAREGTYYAMDYWGQGTTVTVSSGGGGSGGGGSGGGGSGG | DNA Sequence: |
| EIVLTQSPGTLSLSPGERATLSCRSSQSIVHSNGNTYLEWYQQKP | SEQ ID NO: 188 |
| GQAPRLLIYKVSNRFSGIPDRFSGSGSGTDFTLTISRLEPEDFAV | |
| YYCFQGSHVPRTFGGGTKVEIK (SEQ ID NO: 62) | |
| C-002168 BB7.2.5 scFv (humanized): | C-002168 |
| QVTLKQSGAEVKKPGSSVKVSCTASGYTFTSYHVSWVRQAPGQGL | BB7.2.5 scFv |
| EWLGRIYPGDGSTQYNEKFKGKVTITADKSMDTSFMELTSLTSEDT | (humanized) |
| AVYYCAREGTYYAMDLWGQGTLVTVSSGGGGSGGGGSGGGGSGGEI | DNA Sequence: |
| VLTQSPGTLSLSPGERATLSCRSSQSIVHSNGNTYLAWYQQKPGQA | SEQ ID NO: 189 |
| PRLLISKVSNRFSGVPDRFSGSGSGTDFTLTISRLEPEDFAVYYC | |
| QQGSHVPRTFGGGTKVEIK (SEQ ID NO: 63) | |
| C-002169 BB7.2.6 scFv (humanized): | C-002169 |
| QVQLVQSGAEVKKPGASVKVSCKASGYTFTSYHMHWVRQAPGQ | BB7.2.6 scFv |
| RLEWMGWIYPGDGSTQYNEKFKGKVTITRDTSASTAYMELSSLRS | (humanized) |
| EDTAVYYCAREGTYYAMDYWGQGTLVTVSSGGGGSGGGGSGGG | DNA Sequence: |
| GSGGDIVMTQTPLSLPVTPGEPASISCRSSQSIVHSNGNTYLDWYLQ | SEQ ID NO: 190 |
| KPGQSPQLLIYKVSNRFSGVPDRFSGSGSGTDFTLKISRVEAEDVGV | |
| YYCMQGSHVPRTFGGGTKVEIK (SEQ ID NO: 64) | |

[0232] Exemplary heavy chain and light chain CDRs (CDR-H1, CDR-H2 and CDR-H3, or CDR-L1, CDR-L2 and CDR-L3, respectively) for HLA-A*02 ligand binding domains are shown in Table 11 below.

TABLE 11
CDRs corresponding to HLA-A*02 antigen binding domains

| CDR-L1 | CDR-L2 | CDR-L3 | CDR-H1 | CDR-H2 | CDR-H3 |
|---|---|---|---|---|---|
| RSSQSIVHSN | KVSNRFSG | FQGSHVPR | ASGYTFTS | WIYPGNVNTE | EEITYAMDY |
| GNTYLE (SEQ | VPDR (SEQ | T (SEQ ID | YHIH (SEQ | YNEKFKGK (SEQ | (SEQ ID |
| ID NO: 41) | ID NO: 42) | NO: 43) | ID NO: 44) | ID NO: 45) | NO: 46) |
| RSSQSIVHSN | KVSNRFSG | MQGSHVPR | SGYTFTSY | WIYPGDGSTQ | EGTYYAMD |
| GNTYLD (SEQ | VPDR (SEQ | T (SEQ ID | HMH (SEQ | YNEKFKG (SEQ | Y (SEQ ID |
| ID NO: 47) | ID NO: 48) | NO: 49) | ID NO: 50) | ID NO: 51) | NO: 52) |

[0233] In some embodiments, the scFv comprises the complementarity determined regions (CDRs) of any one of SEQ ID NOS: 41-52. In some embodiments, the scFv comprises a sequence at least 95% identical to any one of SEQ ID NOS: 41-52. In some embodiments, the scFv comprises a sequence identical to any one of SEQ ID NOS: 41-52. In some embodiments, the heavy chain of the antibody comprises the heavy chain CDRs of any one of SEQ ID NOS: 53-64, and wherein the light chain of the antibody comprises the light chain CDRs of any one of SEQ ID NOS: 53-64. In some embodiments, the heavy chain of the antibody comprises a sequence at least 95% identical to the heavy chain portion of any one of SEQ ID NOS: 53-64, and wherein the light chain of the antibody comprises a sequence at least 95% identical to the light chain portion of any one of SEQ ID NOS: 53-64.

[0234] In some embodiments, the heavy chain of the antibody comprises a sequence identical to the heavy chain portion of any one of SEQ ID NOS: 53-64, and wherein the light chain of the antibody comprises a sequence identical to the light chain portion of any one of SEQ ID NOS: 53-64.

[0235] In some embodiments, the scFv comprises a sequence at least 95% identical, at least 96% identical, at least 97% identical, at least 98% identical, at least 99% identical or identical to any one of SEQ ID NOS: 53-64.

[0236] In some embodiments, the second, inhibitory ligand is HLA-A*02, and the inhibitory ligand binding domain comprises an HLA-A*02 ligand binding domain. In some embodiments, the second ligand binding domain binds HLA-A*02 independent of the peptide in a pMHC complex comprising HLA-A*02. In some embodiments, the HLA-A*02 ligand binding domain comprises an scFv domain. In some embodiments, the HLA-A*02 ligand binding domain comprises a sequence of any one of SEQ ID NOs: 53-64. In some embodiments, the HLA-A*02 ligand binding domain comprises a sequence at least 90%, at least 95% or at least 99% identical to a sequence of any one of SEQ ID NOs: 53-64. In some embodiments, the HLA-A*02 ligand binding domain is encoded by a sequence comprising any one of SEQ ID NOs: 180-190. In some embodiments, the HLA-A*02 ligand binding domain is encoded by a sequence having at least 80% identity, at least 85% identity, at least 90% identity, at least 95% identity or at least 99% identity to a sequence of any one of SEQ ID NOs: 180-190.

[0237] In some embodiments, the non-target antigen comprises HLA-A*01, and the ligand binding domain of the second receptor comprises an HLA-A*01 ligand binding domain. Exemplary HLA-A*01 ligand binding domains are described in International Patent Application No. PCT/US2021/046733, which is incorporated herein by reference in its entirety. In some embodiments, the ligand binding domain binds HLA-A*01 independent of the peptide in a pMHC complex comprising HLA-A*01. In some embodiments, the HLA-A*01 ligand binding domain comprises an scFv domain. In some embodiments, the HLA-A*01 ligand binding domain comprises a sequence of any one of SEQ ID NOs: 5236-5244. In some embodiments, the HLA-A*01 ligand binding domain comprises a sequence at least 90%, at least 95% or at least 99% identical to a sequence of any one of SEQ ID NO: 5236-5244.

[0238] In some embodiments, the HLA-A*01 scFv comprises (a) a VH comprising a complementarity determined region (CDR) 1 comprising the sequence of any one of SEQ ID NOs: 5132, 5125, 5123, 5130, 5245, 5246, and 5122; a VH CDR2 comprising the sequence of any one of SEQ ID NOs: 5155, 5147, 5145, 5153, 5152, and 5143; and a VH CDR3 comprising the sequence of any one of SEQ ID NOs: 5247-5255 and (b) a VL comprising a VL CDR1 comprising the sequence of any one of SEQ ID NOs: 5226, 6256, 5257, and 5228; a VL CDR2 comprising the sequence of any one of SEQ ID NOs: 5231, 5258, and 5246; and a VL CDR3 comprising the sequence of any one of SEQ ID NOs: 5233, 5259, 5260, and 5234.

[0239] In some embodiments, the non-target antigen comprises HLA-A*03, and the ligand binding domain of the second receptor comprises an HLA-A*03 ligand binding domain. Exemplary HLA-A*03 ligand binding domains are described in International Patent Application No. PCT/US2021/046733, which is incorporated herein by reference in its entirety. In some embodiments, the ligand binding domain binds HLA-A*03 independent of the peptide in a pMHC complex comprising HLA-A*03. In some embodiments, the HLA-A*03 ligand binding domain comprises an scFv domain. In some embodiments, the HLA-A*03 ligand binding domain comprises a sequence of any one of SEQ ID NOs: 5261-5265. In some embodiments, the HLA-A*03 ligand binding domain comprises a sequence at least 90%, at least 95% or at least 99% identical to a sequence of any one of SEQ ID NOs: 5261-5265.

[0240] In some embodiments, the HLA-A*03 scFv comprises (a) a VH comprising a CDR1 comprising the sequence of any one of SEQ ID NOs: 5266-5273; a VH CDR2 comprising the sequence of any one of SEQ ID NOs: 5274-5280; and a VH CDR3 comprising the sequence of any one of SEQ ID NOs: 5281-5294 and (b) a VL comprising a VL CDR1 comprising the sequence of any one of SEQ ID NOs: 5295-5298; a VL CDR2 comprising the sequence of any one of SEQ ID NOs: 5299-5302 and a VL CDR3 comprising the sequence of any one of SEQ ID NOs: 5303-5306.

[0241] In some embodiments, the non-target antigen comprises HLA-A*11, and the ligand binding domain of the second receptor comprises an HLA-A*11 ligand binding domain. Exemplary HLA-A*11 ligand binding domains are described in International Patent Application No. PCT/US2021/046733, which is incorporated herein by reference in its entirety. In some embodiments, the ligand binding domain binds HLA-A*11 independent of the peptide in a pMHC complex comprising HLA-A*11. In some embodiments, the HLA-A*11 ligand binding domain comprises an scFv domain. In some embodiments, the HLA-A*11 ligand binding domain comprises a sequence of any one of SEQ ID NOs: 5307-5315. In some embodiments, the HLA-A*11 ligand binding domain comprises a sequence at least 90%, at least 95% or at least 99% identical to a sequence of any one of SEQ ID NOs: 5307-5315.

[0242] In some embodiments, the HLA-A*11 scFv comprises (a) a VH comprising a CDR1 comprising the sequence of any one of SEQ ID NOs: 5316-5320; a VH CDR2 comprising the sequence of any one of SEQ ID NOs: 5321-5325; and a VH CDR3 comprising the sequence of any one of SEQ ID NOs: 5326-5334 and (b) a VL comprising a VL CDR1 comprising the sequence of SEQ ID NO: 5296; a VL CDR2 comprising the sequence of SEQ ID NO: 5231; and a VL CDR3 comprising the sequence of SEQ ID NO: 5233.

[0243] In some embodiments, the non-target antigen comprises HLA-B*07, and the ligand binding domain of the second receptor comprises an HLA-B*07 ligand binding domain. Exemplary HLA-B*07 ligand binding domains are described in International Patent Application No. PCT/US2021/046733, which is incorporated herein by reference in its entirety for examples of sequences of HLA-B*07 ligand binding domains. In some embodiments, the ligand binding domain binds HLA-B*07 independent of the peptide in a pMHC complex comprising HLA-B*07. In some embodiments, the HLA-B*07 ligand binding domain comprises an scFv domain. In some embodiments, the HLA-B*07 ligand binding domain comprises a sequence of any one of SEQ ID NOs: 5335-5344. In some embodiments, the HLA-B*07 ligand binding domain comprises a sequence at least 90%, at least 95% or at least 99% identical to a sequence of any one of SEQ ID NOs: 5335-5344.

[0244] In some embodiments, the HLA-B*07 scFv comprises (a) a VH comprising a CDR1 comprising the sequence of SEQ ID NO: 5345; a VH CDR2 comprising the sequence of SEQ ID NO: 5346; and a VH CDR3 comprising the sequence of SEQ ID NO: 5347 and (b) a VL comprising a VL CDR1 comprising the sequence of SEQ ID NO: 5348; a VL CDR2 comprising the sequence of SEQ ID NO: 5349; and a VL CDR3 comprising the sequence of SEQ ID NO: 5350.

[0245] In some embodiments, the non-target antigen comprises HLA-C*07, and the ligand binding domain of the second receptor comprises an HLA-C*07 ligand binding domain. Exemplary HLA-C*07 ligand binding domains are described in International Patent Application No. PCT/US2021/046733, which is incorporated herein by reference in its entirety for examples of sequences of HLA-C*07 ligand binding domains. In some embodiments, the ligand binding domain binds HLA-C*07 independent of the peptide in a pMHC complex comprising HLA-C*07. In some embodiments, the HLA-C*07 ligand binding domain comprises an scFv domain. In some embodiments, the HLA-C*07 ligand binding domain comprises a sequence of any one of SEQ ID NOs: 5351-5395. In some embodiments, the HLA-C*07 ligand binding domain comprises a sequence at least 90%, at least 95% or at least 99% identical to a sequence of any one of SEQ ID NOs: 5351-5395.

[0246] In some embodiments, the HLA-C*07 scFv comprises (a) a VH comprising a CDR1 comprising the sequence of any one of SEQ ID NOs: 5396-5405; a VH CDR2 comprising the sequence of any one of SEQ ID NOs: 5406-5415; and a VH CDR3 comprising the sequence of any one of SEQ ID NOs: 5416-5460 and (b) a VL comprising a VL CDR1 comprising the sequence of any one of SEQ ID NOs: 5461-5465; a VL CDR2 comprising the sequence of any one of SEQ ID NOs: 152, 5466-5468; and a VL CDR3 comprising the sequence of any one of SEQ ID NOs: 157, 5469-5473.

### Minor Histocompatibility Antigens

[0247] In some embodiments, the second, inhibitor ligand comprises a minor histocompatibility antigen (MiHA). In some embodiments, the second, inhibitor ligand comprises an allele of a MiHA that is lost in a target cell through LOH.

[0248] MiHAs are peptides derived from proteins that contain nonsynonymous differences between alleles and are displayed by common HLA alleles. The non-synonymous differences can arise from SNPs, deletions, frameshift mutations or insertions in the coding sequence of the gene encoding the MiHA. Exemplary MiHAs can be about 9-12 amino acids in length and can bind to MHC class I and MHC class II proteins. Binding of the TCR to the MHC complex displaying the MiHA can activate T cells. The genetic and immunological properties of MiHAs will be known to the person of ordinary skill in the art. Candidate MiHAs are known peptides presented by known HLA class I alleles, are known to elicit T cell responses in the clinic (for example, in graft versus host disease, or transplant rejection, and allow for patient selection by simple SNP genotyping.

[0249] In some embodiments, the MiHA has broad or ubiquitous RNA expression.

[0250] In some embodiments, the MiHA has high minor allele frequency.

[0251] In some embodiments, the MiHA comprises a peptide derived from a Y chromosome gene.

[0252] In some embodiments, the second inhibitor ligand comprises a MiHA selected from the group of MiHAs disclosed in Tables 12 and 13.

[0253] Exemplary, but non-limiting, examples of MiHAs that are envisaged as within the scope of the instant invention are disclosed in Table 12 below. Columns in Table 12 indicate, from left to right, the name of the MiHA, the gene which from which it is derived, MHC class I variant which can display the MiHA and the sequences of the peptide variants [AB variants indicated in brackets).

TABLE 12
HLA Class I Autosomal MiHAs.

| MiHA | Gene | HLA | Peptide A/B |
|---|---|---|---|
| LB-CYBA- | cytochrome b-245 | A*01:01 | STMERWGQK[Y/H] |
| 1Y | alpha chain (CYBA) | | (SEQ ID NO: 303) |
| LB-OAS1- | 2′-5′-oligoadenylate | A*01:01 | ETDDPR[R/T]YQKY |
| 1R | synthetase 1 (OAS1) | | (SEQ ID NO: 304) |
| HA-1/A2 | Rho GTPase activating | A*02:01 | VL[H/R]DDLLEA |
| | protein 45 (HMHA1) | | (SEQ ID NO: 273) |
| HA-2 | myosin IG (MYO1G) | A*02:01 | YIGEVLVS[V/M] |
| | | | (SEQ ID NO: 305) |
| HA-8 | pumilio RNA binding family | A*02:01 | [R/P]TLDKVLEV |
| | member 3 (KIAA0020, PUM3) | | (SEQ ID NO: 306) |
| HA-3 | A-kinase anchoring | A*01:01 | V[T/M]EPGTAQY |
| | protein 13 (AKAP13) | | (SEQ ID NO: 307) |
| HwA11-S | chromosome 19 open reading | A*02:01 | CIPPD[S/T]LLFPA |
| | frame 48 (C19ORF48) | | (SEQ ID NO: 308) |
| LB-ADIR- | torsin family 3 member A | A*02:01 | SVAPALAL[F/S]PA |
| 1F | (TOR3A) | | (SEQ ID NO: 309) |
| LB- | HIVEP zinc finger 1 | A*02:01 | SLPKH[S/N]VTI |
| HIVEP1-1S | (HIVEP1) | | (SEQ ID NO: 310) |
| LB-NISCH- | nischarin (NISCH) | A*02:01 | ALAPAP[A/V]EV |
| 1A | | | (SEQ ID NO: 111) |
| LB-SSR1- | signal sequence receptor | A*02:01 | [S/L]LAVAQDLT |
| 1S | subunit 1 (SSR1) | | (SEQ ID NO:312) |
| LB-WNK1- | WNK lysine deficient | A*02:01 | RTLSPE[I/M]ITV |
| 1I | protein kinase 1 (WNK1) | | (SEQ ID NO: 313) |
| T4A | tripartite motif | A*02:01 | GLYTYWSAG[A/E] |
| | containing 4 (TRIM42) | | (SEQ ID NO: 314) |
| UTA2-1 | retroelement silencing | A*02:01 | QL[L/P]NSVLTL |
| | factor 1 (KIAA1551) | | (SEQ ID NO: 315) |
| LB- | citramalyl-CoA lyase | A*02:01 | SLAA(Y/D)IPRL |
| CLYBL-1Y | (CLYBL) | | (SEQ ID NO: 316) |
| TRIM22 | tripartite motif | A*02:01 | MAVPPC[C/R]IGV |
| | containing 22 (TRIM22) | | (SEQ ID NO: 317) |
| PARP10-1L | poly(ADP-ribose) polymerase | A*02:01 | GL[L/P]GQEGLVEI |
| | family member 10 (PARP10) | | (SEQ ID NO: 318) |
| FAM119A- | methyltransferase like 21A | A*02:01 | AMLERQF[T/I]V |
| 1T | (FAM119A) | | (SEQ ID NO: 319) |
| GLRX3-1S | glutaredoxin 3 (GLRX3) | A*02:01 | FL[S/P]SANEHL |
| | | | (SEQ ID NO: 320) |
| HNF4G-1M | hepatocyte nuclear | A*02:01 | M[M/I]YKDILLL |
| | factor 4 gamma (HNF4G) | | (SEQ ID NO: 321) |
| HMMR-1V | hyaluronan mediated | A*02:01 | SLQEK[V/A]AKA |
| | motility receptor (HMMR) | | (SEQ ID NO: 322) |
| BCL2A1 | BCL2 related protein A1 | A*02:01 | VLQ[N/K]VAFSV |
| | (BCL2A1) | | (SEQ ID NO: 323) |
| CDC26-1F | cell division cycle 26 | A*02:01 | [F/S]VAGTQEVFV |
| | (CDC26) | | (SEQ ID NO: 324) |
| APOBEC3F- | apolipoprotein B mRNA | A*02:01 | FL[S/A]EHPNVTL |
| 1S/A | editing enzyme catalytic | | (SEQ ID NO: 325) |
| | subunit 3F (APOBEC3F) | | |
| LB-PRCP- | prolylcarboxypeptidase | A*02:01 | FMWDVAE[D/E]L (9mer) |
| 1D | (PRCP) | | (SEQ ID NO: 326), |
| | | | FMWDVAE[D/E]LKA (11mer) |
| | | | (SEQ ID NO: 327) |
| LB-CCL4- | C-C motif chemokine | A*02:01 | CADPSE[T/S]WV |
| 1T | ligand 4 (CCL4) | | (SEQ ID NO: 328) |
| LB- | non-SMC condensin II | A*02:01 | WL[Q/R]GVVPVV |
| NCAPD3- | complex subunit D | | (SEQ ID NO: 329) |
| 1Q | (NCAPD3) | | |
| LB-NDC80- | NDC80 kinetochore complex | A*02:01 | HLEEQI[P/A]KV |
| 1P | component (NDC80) | | (SEQ ID NO: 330) |
| LB-TTK- | TTK protein kinase (TTK) | A*02:01 | RLH[D/E]GRVFV |
| 1D | | | (SEQ ID NO: i31i |
| WDR27-1L | WD repeat domain 27 (WDR27) | A*02:01 | S[L/P]DDHVVAV |
| | | | (SEQ ID NO: 332) |
| MIIP | migration and invasion | A*02:01 | SEESAVP[K/E]RSW (11mer) |
| | inhibitory protein (MIIP) | | (SEQ ID NO: 333), |
| | | | EESAVP[K/E]RSW (10mer) |
| | | | (SEQ ID NO: 334) |
| HER- | E erb-b2 receptor tyrosine | A*02:01 | not reported |
| 2/NEU | kinase 2 (RBB2) | | |
| LB- | DEAH-box helicase 33 | A*02:01, | YLYEGGIS[C/R] |
| DHX33-1C | (DHX33) | C*03:03 | (SEQ ID NO: 335) |
| PANE1 | centromere protein M | A*03:01 | RVWDLPGVLK |
| | (CENPM) | | (SEQ ID NO: 336) |
| SP110 | SP110 nuclear body protein | A*03:01 | SLP[R/G]GTSTPK |
| | (SP110) | | (SEQ ID NO: 337) |
| ACC-1C/Y | BCL2 related protein A1 | A*24:02 | DYLQ[Y/C]VLQI |
| | (BCL2A1) | | (SEQ ID NO: 338) |
| P2RX7 | purinergic receptor P2X 7 | A*29:02 | WFHHC[H/R]PKY |
| | (P2RX7) | | (SEQ ID NO: 339) |
| ACC-4 | cathepsin H (CTSH) | A*31:01 | ATLPLLCA[R/G] |
| | | | (SEQ ID NO: 340) |
| ACC-5 | CTSH | A*33:03 | WATLPLLCA[R/G] |
| | | | (SEQ ID NO: 341) |
| AKAP13 | A-kinase anchoring | B*07:02 | APAGVREV[M/T] |
| | protein 13 (AKAP13) | | (SEQ ID NO: 342) |
| LB- | apolipoprotein B mRNA | B*07:02, | [K/E]PQYHAEMCF |
| APOBEC3 | editing enzyme catalytic | B*08:01 | (SEQ ID NO: 343) |
| B-1K | subunit 3B (APOBEC3B) | | |
| APOBEC3H | apolipoprotein B mRNA | | KPQQ[K/E]GLRL |
| | editing enzyme catalytic | B*07:02 | (SEQ ID NO: 344) |
| | subunit 3H (APOBEC3H) | | |
| LB- | Rho GDP dissociation | B*07:02 | LPRACW[R/P]EA |
| ARHGDIB- | inhibitor beta (ARHGDIB) | | (SEQ ID NO: 345) |
| 1R | | | |
| LB- | BCAT2-branched chain | B*07:02 | QP[R/T]RALLFVIL |
| BCAT2-1R | amino acid transaminase 2 | | (SEQ ID NO: 346) |
| | (BCAT2) | | |
| BFAR | bifunctional apoptosis | B*07:02 | APNTGRANQQ[M/R] |
| | regulator (BFAR) | | (SEQ ID NO: 347) |
| C14orf169 | ribosomal oxygenase 1 | B*07:02 | RPR[A/V]PTEELAL |
| | (C14orf169 or RIOX1) | | (SEQ ID NO: 348) |
| LB- | C16ORF | B*07:02 | [R/W]PCPSVGLSFL |
| C16ORF-1R | | | (SEQ ID NO: 349) |
| C18orf21 | chromosome 18 open reading | B*07:02 | NPATP[A/T]SKL |
| | frame 21 (C18orf21) | | (SEQ ID NO: 350) |
| LB-EBI3-1I | Epstein-Barr virus | B*07:02 | RPRARYY[I/V]QV |
| | induced 3 (EBI3) | | (SEQ ID NO: 351) |
| POP1 | POP1 homolog, ribonuclease | B*07:02 | LPQKKS[N/K]AL |
| | P/MRP subunit (POP1) | | (SEQ ID NO: 352) |
| SCRIB | scribble planar cell | B*07:02 | LPQQPP[L/P]SL |
| | polarity protein (SCRIB) | | (SEQ ID NO: 353) |
| MTRR | 5-methyltetrahydrofolate- | B*07:02 | SPAS[S/L]RTDL |
| | homocysteine methyltransferase | | (SEQ ID NO: 354) |
| | reductase (MTRR) | | |
| LLGL2 | LLGL scribble cell polarity | B*07:02 | SPSL[R/H]ILAI |
| | complex component 2 (LLGL2) | | (SEQ ID NO: 155) |
| LB-ECGF- | thymidine phosphorylase | B*07:02 | RP[H/R]AIRRPLAL |
| 1H | (TYMP) | | (SEQ ID NO: 356) |
| LB-ERAP1- | endoplasmic reticulum | B*07:02 | HP[R/P]QEQIALLA (11mer) |
| 1R | aminopeptidase 1 (ERAP1) | | (SEQ ID NO: 357), |
| | | | HP[R/P]QEQIAL (9mer) |
| | | | (SEQ ID NO: 358) |
| LB- | alpha-L-fucosidase 2 (FUCA2) | B*07:02 | RLRQ[V/M]GSWL |
| FUCA2-1V | | | (SEQ ID NO: 359) |
| LB- | gem nuclear organelle | B*07:02, | FPALRFVE[V/E] |
| GEMIN4-1V | associated protein 4 (GEMIN4) | B*08:01 | (SEQ ID NO: 360) |
| HDGF | heparin binding growth factor | B*07:02 | LPMEVEKNST[L/P] |
| | (HDGF) | | (SEQ ID NO: 361) |
| LB- | programmed cell death 11 | B*07:02 | GPDSSKT[F/L]LCL |
| PDCD11-1F | (PDCD11) | | (SEQ ID NO: 362) |
| LB-PFAS- | phosphoribosylformylglycinami | B*07:02 | A[P/S]GHTRRKL |
| 1P | dine synthase (PFAS) | | (SEQ ID NO: 363) |
| LB-TEP1- | telomerase associated protein 1 | B*07:02 | APDGAKVA[S/P]L |
| 1S | (TEP1) | | (SEQ ID NO: 364) |
| LB- | post- | B*07:02 | RPRSVT[I/V]QPLL |
| TMEM8A- | glycosylphosphatidylinositol | | (SEQ ID NO: 365) |
| 1I | attachment to proteins 6 | | |
| | (TMEM8A or PGAP6) | | |
| LB-USP15- | ubiquitin specific peptidase | B*07:02 | MPSHLRN[I/T]LL |
| 1I | 15 (USP15) | | (SEQ ID NO: 366) |
| LRH-1 | purinergic receptor P2X 5 | B*07:02 | TPNQRQNVC |
| | (P2RX5) | | (SEQ ID NO: 367) |
| LB- | MOB kinase activator 3A | B*07:02 | [C/S]PRPGTWTC |
| MOB3A-1C | (MOB3A) | | (SEQ ID NO: 368) |
| LB- | zinc finger DHHC-type | B*07:02 | RPR[Y/H]WILLVKI |
| ZDHHC6- | palmitoyltransferase 6 | | (SEQ ID NO: 369) |
| 1Y | (ZDHHC6) | | |
| ZAPHIR | zinc finger protein 419 | B*07:02 | IPRDSWWVEL |
| | (ZNF419) | | (SEQ ID NO: 370) |
| HEATR1 | HEAT repeat containing 1 | B*08:01 | ISKERA[E/G]AL |
| | (HEATR1) | | (SEQ ID NO: 371) |
| LB-GSTP1- | glutathione S-transferase | B*08:01 | DLRCKY[V/I]SL |
| IV | pi 1 (GSTP1) | | (SEQ ID NO: 372) |
| HA-1/B60 | Rho GTPase activating protein | B*40:01 | KECVL[H/R]DDL |
| | 45 (HMHA1) | | (SEQ ID NO: 373) |
| LB-SON- | SON DNA and RNA binding | B*40:01 | SETKQ[R/C]TVL |
| 1R | protein (SON) | | (SEQ ID NO: 374) |
| LB- | switching B cell complex | B*40:01 | MEQLE[Q/E]LEL |
| SWAP70-1Q | subunit SWAP70 (SWAP70) | | (SEQ ID NO: 375) |
| LB- | thyroid hormone receptor | B*40:01 | G[E/G][P/S]QDL[C/G]TL |
| TRIP10- | interactor 10 (TRIP 10) | | (SEQ ID NO: 376) |
| 1EPC | | | |
| LB- | nucleoporin 133 (NUP133) | B*40:01 | SEDLILC[R/Q]L |
| NUP133-1R | | | (SEQ ID NO: 377) |
| LB-ZNFX1- | zinc finger NFXl-type | B*40:01 | NEIEDVW[Q/H]LDL |
| 1Q | containing 1 (ZNFX1) | | (SEQ ID NO: 378) |
| SLC1A5 | solute carrier family 1 | B*40:02 | AE[A/P]TANGGLAL |
| | member 5 (SLC1A5) | | (SEQ ID NO: 379) |
| ACC-2 | BCL2A1 | B*44:02, | KEFED[D/G]IINW |
| | | B*44:03 | (SEQ ID NO: 380) |
| ACC-6 | histocompatibility minor serpin | B*44:03 | MEIFIEVFSHF |
| | domain containing (HMSD) | | (SEQ ID NO: 381) |
| HB-1H/Y | histocompatibility minor HB-1 | B*44:03 | EEKRGSL[H/Y]VW |
| | (HMHB1) | | (SEQ ID NO: 382) |
| DPH1 | diphthamide biosynthesis 1 | B*57:01 | S[V/L]LPEVDVW |
| | (DPH1) | | (SEQ ID NO: 383) |
| UGT2B17/ | UDP glucuronosyltransferase | A*02:06 | CVATMIFMI |
| A02 | family 2 member B17 | | (SEQ ID NO: 384) |
| | (UGT2B17) | | |
| UGT2B17/ A29 | UGT2B17 | A*29:02 | AELLNIPFLY (SEQ ID NO: 385) |
| UGT2B17/ | UGT2B17 | B*44:03 | AELLNIPFLY |
| B44 | | | (SEQ ID NO: 386) |

[0254] Exemplary, but non-limiting, examples of MiHAs that are envisaged as within the scope of the instant invention are disclosed in Table 13 below. Columns in Table 13 indicate, from left to right, the name of the MiHA, the gene which from which it is derived, MHC class I variant which can display the MiHA and the sequences of the peptide variants [AB variants indicated in brackets).

TABLE 13
HLA Class I Y linked MiHAs

| MiHA | Gene | HLA | Peptide A/B |
|---|---|---|---|
| DFFRY | ubiquitin specific peptidase | A*01:01 | IVD[C/S]LTEMY |
| | 9 Y-linked (DFFRY) | | (SEQ. ID NO: 387) |
| SMCY | lysine demethylase 5 (SMCY) | A*02:01 | FIDSYICQV |
| | | | (SEQ. ID NO: 388) |
| TMSB4Y | thymosin beta 4 Y-linked | A*33:03 | EVLLRPGLHFR |
| | | | (SEQ. ID NO: 389) |
| SMCY | (TMSB4Y) SMCY | B*07:02 | SP[S/A]VDKA[R/Q]AEL |
| | | | (SEQ ID NO: 34) |
| UTY | ubiquitously transcribed | B*08:01 | LPHN[H/R]T[D/N]L |
| | tetratricopeptide repeat | | (SEQ ID NO: 25) |
| | containing, Y-linked (UTY) | | |
| RPS4Y | ribosomal protein | B*52:01 | TIRYPDP[V/L]I |
| | S4 Y-linked 1 (RPS4Y) | | (SEQ ID NO: 24) |
| UTY | UTY | B*60:01 | [R/G]ESEE[E/A]S[V/P]SL |
| | | | (SEQ ID NO: 23) |

[0255] In some embodiments, the MiHA comprises HA-1. HA-1 is a peptide antigen having a sequence of VL[H/R]DDLLEA (SEQ ID NO: 273), and is derived from the Rho GTPase activating protein 45 (HA-1) gene.

[0256] Exemplary ligand binding domains that selectively bind to HA-1 variant H peptide (VLHDDLLEA (SEQ ID NO: 191)) are shown in Table 14 below. TCR alpha and TCR beta sequences in SEQ ID NO: 193 are separated by a P2A self-cleaving polypeptide of sequence ATNFSLLKQAGDVEENPGP (SEQ ID NO: 192) with an N terminal GSG linker.

TABLE 14
Ftcr HA-1(H) Inhibitory Receptor Sequences

| C-003754 KP7 HA-1H TCRalpha T48C P2A KP7 HA-1H TCRbeta S57C: | C-003754 |
|---|---|
| MVKIRQFLLAILWLQLSCVSAAKNEVEQSPQNLTAQEGEFITINCSYSVGISALHWLQQHP | KP7 HA-1H |
| GGGIVSLFMLSSGKKKHGRLIATINIQEKHSSLHITASHPRDSAVYICAVRSVSGAGSYQLTF | TCRalpha |
| GKGTKLSVIPNIQNPDPAVYQLRDSKSSDKSVCLFTDFDSQTNVSQSKDSDVYITDKCVLD | T48C P2A |
| MRSMDFKSNSAVAWSNKSDFACANAFNNSIIPEDTFFPSPESSCDVKLVEKSFETDTNLN | KP7 HA-1H |
| FQNLSVIGFRILLLKVAGFNLLMTLRLWSSGSGATNFSLLKQAGDVEENPGPMGTSLLCW | TCRbeta |
| MALCLLGADHADTGVSQNPRHKITKRGQNVTFRCDPISEHNRLYWYRQTLGQGPEFLTY | S57C DNA |
| FQNEAQLEKSRLLSDRFSAERPKGSFSTLEIQRTEQGDSAMYLCASSIDSFNEQFFGPGTRL | Sequence: |
| TVLEDLKNVFPPEVAVFEPSEAEISHTQKATLVCLATGFYPDHVELSWWVNGKEVHSGVC | SEQ. ID NO: |
| TDPQPLKEQPALNDSRYCLSSRLRVSATFWQNPRNHFRCQVQFYGLSENDEWTQDRAK | 194 |
| PVTQIVSAEAWGRADCGFTSESYQQGVLSATILYEILLGKATLYAVLVSALVLMAMVKRKD | |
| SRG (SEQ ID NO: 193) | |
| HA-1H TCR alpha: | HA-1H TCR |
| MVKIRQFLLAILWLQLSCVSAAKNEVEQSPQNLTAQEGEFITINCSYSVGISALHWLQQHP | alpha DNA |
| GGGIVSLFMLSSGKKKHGRLIATINIQEKHSSLHITASHPRDSAVYICAVRSVSGAGSYQLTF | Sequence: |
| GKGTKLSVIPNIQNPDPAVYQLRDSKSSDKSVCLFTDFDSQTNVSQSKDSDVYITDKCVLD | SEQ. ID NO: |
| MRSMDFKSNSAVAWSNKSDFACANAFNNSIIPEDTFFPSPESSCDVKLVEKSFETDTNLN | 201 |
| FQNLS (SEQ. ID: 199) | |
| HA-1(H) TCRbeta: | HA-1H |
| MGTSLLCWMALCLLGADHADTGVSQNPRHKITKRGQNVTFRCDPISEHNRLYWYRQTL | TCRbeta |
| GQGPEFLTYFQNEAQLEKSRLLSDRFSAERPKGSFSTLEIQRTEQGDSAMYLCASSIDSFNE | DNA |
| QFFGPGTRLTVLEDLKNVFPPEVAVFEPSEAEISHTQKATLVCLATGFYPDHVELSWWVN | Sequence: |
| GKEVHSGVCTDPQPLKEQPALNDSRYCLSSRLRVSATFWQNPRNHFRCQVQFYGLSEND | SEQ ID NO: |
| EWTQDRAKPVTQIVSAEAWGRADCGFTSESYQQGVLS (SEQ ID NO: 200) | 202 |
| C-003755 KP7 HA-1H FTCRalpha LIR1 TICD: | C-003755 |
| MVKIRQFLLAILWLQLSCVSAAKNEVEQSPQNLTAQEGEFITINCSYSVGISALHWLQQHP | KP7 HA-1H |
| GGGIVSLFMLSSGKKKHGRLIATINIQEKHSSLHITASHPRDSAVYICAVRSVSGAGSYQLTF | FTCRalpha |
| GKGTKLSVIPNIQNPDPAVYQLRDSKSSDKSVCLFTDFDSQTNVSQSKDSDVYITDKCVLD | LIR1 TICD |
| MRSMDFKSNSAVAWSNKSDFACANAFNNSIIPEDTFFPSPESSCDVKLVEKSFETDTNLN | DNA |
| FQNLSVVIGILVAVILLLLLLLLLFLILRHRRQGKHWTSTQRKADFQHPAGAVGPEPTDRGL | Sequence: |
| QWRSSPAADAQEENLYAAVKHTQPEDGVEMDTRSPHDEDPQAVTYAEVKHSRPRREM | SEQ ID NO: |
| ASPPSPLSGEFLDTKDRQAEEDRQMDTEAAASEAPQDVTYAQLHSLTLRREATEPPPSQE | 196 |
| GPSPAVPSIYATLAIH (SEQ ID NO: 195) | |
| C-003756 KP7 HA-1H FTCRbeta LIR1 TICD: | C-003756 |
| MGTSLLCWMALCLLGADHADTGVSQNPRHKITKRGQNVTFRCDPISEHNRLYWYRQTL | KP7 HA-1H |
| GQGPEFLTYFQNEAQLEKSRLLSDRFSAERPKGSFSTLEIQRTEQGDSAMYLCASSIDSFNE | FTCRbeta |
| QFFGPGTRLTVLEDLKNVFPPEVAVFEPSEAEISHTQKATLVCLATGFYPDHVELSWWVN | LIR1 TICD |
| GKEVHSGVCTDPQPLKEQPALNDSRYCLSSRLRVSATFWQNPRNHFRCQVQFYGLSEND | DNA |
| EWTQDRAKPVTQIVSAEAWGRADCGFTSESYQQGVLSVVIGILVAVILLLLLLLLLFLILRHR | Sequence: |
| RQGKHWTSTQRKADFQHPAGAVGPEPTDRGLQWRSSPAADAQEENLYAAVKHTQPE | SEQ ID NO: |
| DGVEMDTRSPHDEDPQAVTYAEVKHSRPRREMASPPSPLSGEFLDTKDRQAEEDRQMD | 198 |
| TEAAASEAPQDVTYAQLHSLTLRREATEPPPSQEGPSPAVPSIYATLAIH (SEQ ID NO: | |
| 197) | |

[0257] In some embodiments, the second, inhibitory ligand comprises HA-1(H). In some embodiments, the second, inhibitory ligand binding is isolated or derived from a TCR. In some embodiments, the second, inhibitory ligand binding domain comprises TCR alpha and TCR beta variable domains. In some embodiments, the TCR alpha and TCR beta variable domains are separated by a self cleaving polypeptide sequence. In some embodiments, the TCR alpha and TCR beta variable domains separated by a self cleaving polypeptide sequence comprise SEQ ID NO: 193. In some embodiments, the TCR alpha and TCR beta variable domains separated by a self cleaving polypeptide sequence comprise SEQ ID NO: 193, or a sequence having at least 90%, at least 95%, or at least 99% identity thereto. In some embodiments, the TCR alpha and TCR beta variable domains are encoded by a sequence of SEQ ID NO: 194, or a sequence having at least 80% identity, at least 90%, at least 95%, or at least 99% identity thereto. In some embodiments, the TCR alpha variable domain comprises SEQ ID NO: 199 or a sequence having at least 90%, at least 95%, or at least 99% identity thereto. In some embodiments, the TCR beta variable domain comprises SEQ ID NO: 200 or a sequence having at least 90%, at least 95%, or at least 99% identity thereto.

### Loss of Y Chromosome Antigens

[0258] In some embodiments, the second, inhibitor ligand comprises a Y chromosome gene, i.e. peptide encoded by a gene on the Y chromosome. In some embodiments, the second, inhibitor ligand comprises a peptide encoded by a Y chromosome gene that is lost in target cells through loss of Y chromosome (LoY). For example, about a third of the characterized MiHAs come from the Y chromosome. The Y chromosome contains over 200 protein coding genes, all of which are envisaged as within the scope of the instant disclosure.

[0259] As used herein, “loss of Y”, or “LoY” refers a genetic change that occurs at high frequency in tumors whereby one copy of part or all of the Y chromosome is deleted, leading to a loss of Y chromosome encoded gene(s).

[0260] Loss of Y chromosome is known to occur in certain cancers. For example, there is a reported 40% somatic loss of Y chromosome in renal clear cell cancers (Arseneault et al., Sci. Rep. 7: 44876 (2017)). Similarly, clonal loss of the Y chromosome was reported in 5 out of 31 in male breast cancer subjects (Wong et al., Oncotarget 6(42):44927-40 (2015)). Loss of the Y chromosome in tumors from male patients has been described as a “consistent feature” of head and neck cancer patients (el-Naggar et al., Am J Clin Pathol 105(1):102-8 (1996)). Further, Y chromosome loss was associated with X chromosome disomy in four of seven male patients with gastric cancer (Saal et al., Virchows Arch B Cell Pathol (1993)). Thus, Y chromosome genes can be lost in a variety of cancers, and can be used as inhibitor ligands with the engineered receptors of the instant disclosure targeting cancer cells.

### Antigen Binding Domains

[0261] The disclosure provides a first ligand binding domain that activates a first engineered receptor, thereby activating immune cells expressing the first engineered receptor, and a second ligand binding domain that activates a second engineered receptor that inhibits activation of immune cells expressing the second engineered receptor, even in the presence of the first engineered receptor bound to the first ligand.

[0262] Any type of ligand binding domain that can regulate the activity of a receptor in a ligand dependent manner is envisaged as within the scope of the instant disclosure. In some embodiments, the ligand binding domain is an antigen binding domain. Exemplary antigen binding domains include, inter alia, scFv, SdAb, Vβ-only domains, and TCR antigen binding domains derived from the TCR α and β chain variable domains.

[0263] In some embodiments, the first, activator LBD comprises an antigen binding domain. In some embodiments, the second, inhibitor LBD comprises an antigen binding domain. Any type of antigen binding domain is envisaged as within the scope of the instant disclosure.

[0264] For example, the first, activator LBD and/or the second, inhibitor LBD can comprise an antigen binding domain that can be expressed as part of a contiguous polypeptide chain including, for example, a single domain antibody fragment (sdAb) or heavy chain antibodies HCAb, a single chain antibody (scFv) derived from a murine, humanized or human antibodies (Harlow et al., 1999, In: Using Antibodies: A Laboratory Manual, Cold Spring Harbor Laboratory Press, N.Y.; Harlow et al., 1989, In: Antibodies: A Laboratory Manual, Cold Spring Harbor, N.Y.; Houston et al., 1988, Proc. Natl. Acad. Sci. USA 85:5879-5883; Bird et al., 1988, Science 242:423-426). In some aspects, the first, activator LBD and/or the second, inhibitor LBD comprises an antigen binding domain that comprises an antibody fragment. In further aspects, the activator LBD comprises an antibody fragment that comprises a scFv or an sdAb. In further aspects, the inhibitor LBD comprises an antibody fragment that comprises a scFv or an sdAb.

[0265] The term “antibody,” as used herein, refers to a protein, or polypeptide sequences derived from an immunoglobulin molecule, which specifically binds to an antigen. Antibodies can be intact immunoglobulins of polyclonal or monoclonal origin, or fragments thereof and can be derived from natural or from recombinant sources.

[0266] The terms “antibody fragment” or “antibody binding domain” refer to at least one portion of an antibody, or recombinant variants thereof, that contains the antigen binding domain, i.e., an antigenic determining variable region of an intact antibody, that is sufficient to confer recognition and specific binding of the antibody fragment to a target, such as an antigen and its defined epitope. Examples of antibody fragments include, but are not limited to, Fab, Fab′, F(ab′)2, and Fv fragments, single-chain (sc)Fv (“scFv”) antibody fragments, linear antibodies, single domain antibodies (abbreviated “sdAb”) (either VL or VH), camelid VHH domains, and multi-specific antibodies formed from antibody fragments.

[0267] The term “scFv” refers to a fusion protein comprising at least one antibody fragment comprising a variable region of a light chain and at least one antibody fragment comprising a variable region of a heavy chain, wherein the light and heavy chain variable regions are contiguously linked via a short flexible polypeptide linker, and capable of being expressed as a single polypeptide chain, and wherein the scFv retains the specificity of the intact antibody from which it is derived.

[0268] “Heavy chain variable region” or “VH” (or, in the case of single domain antibodies, e.g., nanobodies, “VHH”) with regard to an antibody refers to the fragment of the heavy chain that contains three CDRs interposed between flanking stretches known as framework regions, these framework regions are generally more highly conserved than the CDRs and form a scaffold to support the CDRs.

[0269] Unless specified, as used herein a scFv may have the VL and VH variable regions in either order, e.g., with respect to the N-terminal and C-terminal ends of the polypeptide, the scFv may comprise VL-linker-VH or may comprise VH-linker-VL.

[0270] The term “antibody light chain,” refers to the smaller of the two types of polypeptide chains present in antibody molecules in their naturally occurring conformations. Kappa (“K”) and lambda (“γ”) light chains refer to the two major antibody light chain isotypes.

[0271] The term “recombinant antibody” refers to an antibody that is generated using recombinant DNA technology, such as, for example, an antibody expressed by a bacteriophage or yeast expression system. The term should also be construed to mean an antibody which has been generated by the synthesis of a DNA molecule encoding the antibody and which DNA molecule expresses an antibody protein, or an amino acid sequence specifying the antibody, wherein the DNA or amino acid sequence has been obtained using recombinant DNA or amino acid sequence technology which is available and well known in the art.

[0272] The term “βdomain”, “Vβ-only domain”, “β chain variable domain” or “single variable domain TCR (svd-TCR)” refers to an antigen binding domain that consists essentially of a single T Cell Receptor (TCR) beta variable domain that specifically binds to an antigen in the absence of a second TCR variable domain. In some embodiments, the first, activator LBD comprises or consists essentially of a Vβ-only domain. In some embodiments, the second, inhibitor LBD comprises or consists essentially of a Vβ-only domain.

[0273] In some embodiments, the Vβ-only domain may include additional elements besides the TCR variable domain, including additional amino acid sequences, additional protein domains (covalently associated, non-covalently associated or covalently and non-covalently associated with the TCR variable domain), fusion or non-covalent association of the TCR variable domain with other types of macromolecules (for example polynucleotides, polysaccharides, lipids, or a combination thereof), fusion or non-covalent association of the TCR variable domain with one or more small molecules, compounds, or ligands, or a combination thereof. Any additional element, as described, may be combined provided that the TCR variable domain is configured to specifically bind the epitope in the absence of a second TCR variable domain.

[0274] In other embodiments, the Vβ-only domain as described herein functions independently of an a chain that lacks a Vα segment. For example, in some embodiments the one or more Vβ-only domains are fused to transmembrane (e.g., CD3ζ and CD28) and intracellular domain proteins (e.g., CD3ζ, CD28, and/or 4-1BB) that are capable of activating T cells in response to antigen.

[0275] In some embodiments, the Vβ-only domain engages antigen using complementarity-determining regions (CDRs). Each s Vβ-only domain contains three complement determining regions (CDR1, CDR2, and CDR3).

[0276] In some embodiments, the first Vβ-only domain comprises a TCR Vβ domain or an antigen-binding fragment thereof.

[0277] In humans, the TCR variable regions of the α and γ chains are each encoded by a V and a J segment, whereas the variable region of β and δ chains are each additionally encoded by a D segment. There are multiple Variable (V), Diversity (D) and Joining (J) gene segments (e.g. 52 Vβ gene segments, 2 Dβ gene segments and 13 Jβ gene segments) (Janeway et al. (eds.), 2001, Immunobiology: The Immune System in Health and Disease. 5th Edition, New York, FIG. 4.13) which can be recombined in different V(D)J arrangements using the enzymes RAG-1 and RAG-2, which recognize recombination signal sequences (RSSs) adjacent to the coding sequences of the V, D and J gene segments. The RSSs consist of conserved heptamers and nonamers separated by spacers of 12 or 23 bp. The RSSs are found at the 3′ side of each V segment, on both the 5′ and 3′ sides of each D segment, and at the 5′ of each J segment. During recombination, RAG-1 and RAG-2 cause the formation of DNA hairpins at the coding ends of the joint (the coding joint) and removal of the RSSs and intervening sequence between them (the signal joint). The variable regions are further diversified at the junctions by deletion of a variable number of coding end nucleotides, the random addition of nucleotides by terminal deoxynucleotidyl transferase (TdT), and palindromic nucleotides that arise due to template-mediated fill-in of the asymmetrically cleaved coding hairpins.

[0278] Patent applications WO 2009/129247 (herein incorporated by reference in its entirety) discloses an in vitro system, referred to as the HuTarg system, which utilizes V(D)J recombination to generate de novo antibodies in vitro. This same system was used to generate the variable regions of the Vβ-only domain as in patent application WO 2017/091905 (herein incorporated by reference in its entirety) by using TCR-specific V, D and J elements. In natural in vivo systems, the nucleic acid sequences which encode CDR1 and CDR2 are contained within the V (α, β, γ or δ) gene segment and the sequence encoding CDR3 is made up from portions of V and J segments (for Vα or V γ) or a portion of the V segment, the entire D segment and a portion of the J segment (for Vβ or Vδ), but with random insertions and deletions of nucleotides at the V-J and V-D-J recombination junctions due to action of TdT and other recombination and DNA repair enzymes. The recombined T-cell receptor gene comprises alternating framework (FR) and CDR sequences, as does the resulting T-cell receptor expressed therefrom (i.e. FR1-CDR1-FR2-CDR2-FR3-CDR3-FR4). Using in vitro V(D)J recombination (i.e. V-J or V-D-J recombination), randomized insertions and deletions may be added in or adjacent to CDR1, CDR2 and/or CDR3 (i.e. not just CDR3), additional insertions may be added using flanking sequences in recombination substrates before and/or after CDR1, CDR2 and/or CDR3, and additional deletions may be made by deleting sequences in recombination substrates in or adjacent to CDR1, CDR2 and/or CDR3.

[0279] In some embodiments, TCR Vβ chains were identified that specifically bind epitopes in the absence of TCR Vα chains. Exemplary CDR3 amino acid sequences that bind epitopes in the absence of TCR Vα chains are set forth in SEQ ID NOs: 199-205.

[0280] In some embodiments, the Vβ-only domain specifically binds to an epitope in the absence of a second TCR variable domain, and consists of optional N-terminal and/or C-terminal amino acid sequences (of any length or sequence) flanking a variable domain defined by FR1 -CDR1 -FR2-CDR2-FR3-CDR3-FR4 regions. FR1, FR2, FR3 and FR4 may be obtained from a natural Vα, Vβ, Vγ or Vδ domain or encoded by natural Vα, Vβ, Vγ or Vδ gene segments, but optionally include deletions or insertions of (e.g. 0, 1, 2, 3, 4, 5 or more than 5 amino acids) amino acids independently at one or more of the C-terminus of FR1 , the N-terminus of FR2, the C-terminus of FR2, the N-terminus of FR3, the C-terminus of FR3 and the N-terminus of FR4. CDR1, CDR2 and CDR3 may be obtained from a natural Vα, Vβ, Vγ or Vδ domain, or encoded by natural Vα, Vβ, Vγ or Vδ gene segments, but wherein one or more of CDR1, CDR2 and CDR3 independently contains an insertion (e.g. 0, 1, 2, 3, 4, 5, 6, 7, 8, 9, 10 or more than 10 amino acids) and/or a deletion (e.g. 0, 1, 2, 3, 4, 5 or more than 5 amino acids) at the C-terminus, the N- terminus or anywhere within the CDR sequence. In some embodiments, the CDR1 contains an insertion or deletion of amino acids N-terminally, C-terminally or internally, wherein at least 50% (or optionally 60%, 70% or 80%) of natural CDR amino acid residues are retained. In some embodiments, the CDR2 contains an insertion or deletion of amino acids N-terminally, C-terminally or internally, wherein at least 50% (or optionally 60%, 70% or 80%) of natural CDR amino acid residues are retained. In some embodiments, the CDR3 contains an insertion or deletion of amino acids N-terminally, C-terminally or internally, wherein at least 50% (or optionally 60%, 70% or 80%) of natural CDR amino acid residues are retained. Insertions and/or deletions may be produced as a result of in vitro V(D)J recombination methods or from the in-vitro action of TdT and recombination and DNA repair enzymes (e.g. one or more of Artemis nuclease, NDA-dependent protein kinase (DNA-PK), X-ray repair cross-complementing protein 4 (XRCC4), DNA ligase IV, non-homologous end-joining factor 1 (NHEJ1), PAXX, and DNA polymerases γ and μ). Insertion and/or deletion (which includes substitution) may further result from insertions and/or deletions to CDR nucleic acid sequences of the in vitro V(D)J recombination substrates. The Vβ-only domain may further comprise a TCR constant region or portion thereof. The Vβ-only domain may be fused to and/or complexed with additional protein domains. A double stranded break in DNA may be introduced prior to in vitro use of the above recombination and DNA repair enzymes. The Vβ-only domain may be (or may be incorporated into) a fusion protein. As used herein, the term “fusion protein” means a protein encoded by at least one nucleic acid coding sequence that is comprised of a fusion of two or more coding sequences from separate genes, regardless of whether the organism source of those genes is the same or different.

[0281] In some embodiments, the first, activator LBD comprises an ScFv domain and the second, inhibitor LBD comprises a Vβ-only domain. In some embodiments, the first, activator LBD comprises a Vβ-only domain and the second, inhibitor LBD comprises an ScFv domain. In some embodiments, both the first, activator LBD and the second, inhibitor LBD are ScFv domains. In some embodiments, both the first, activator LBD and the second, inhibitor LBD are Vβ-only domains.

[0282] Additional antigen binding domains used with the activator and/or inhibitor receptors of the disclosure are set forth in SEQ ID NOs: 206, 208, 210 ,212, 214, 216, 218, and 220. Exemplary nucleic acid sequences encoding these antigen binding domains are set forth in SEQ ID NOs: 207, 209, 211, 213, 215, 217, 219, and 221. In some embodiments, the first or second ligand binding domain comprises a sequence of any one of SEQ ID NO: 206, SEQ ID NO: 208, SEQ ID NO: 210, SEQ ID NO: 212, SEQ ID NO: 214, SEQ ID NO: 216, SEQ ID NO: 218 or SEQ ID NO: 220, or a sequence having at least 90%, at least 95% or at least 99% identity thereto.

### Engineered Receptors

[0283] The disclosure provides a first engineered receptor comprising a first activator ligand binding domain and a second engineered receptor comprising a second inhibitor ligand binding domain described herein.

### Chimeric Antigen Receptors (CARs)

[0284] In some embodiments, either the first or the second engineered receptor is a chimeric antigen receptor (CAR). In some embodiments, the first and second engineered receptors are chimeric antigen receptors. All CAR architectures are envisaged as within the scope of the instant disclosure.

### Extracellular Domains

[0285] In some embodiments, the first or second ligand binding domain is fused to the extracellular domain of the CAR.

### Hinge Region

[0286] In some embodiments, the CARs of the present disclosure comprise an extracellular hinge region. Incorporation of a hinge region can affect cytokine production from CAR-T cells and improve expansion of CAR-T cells in vivo. Exemplary hinges can be isolated or derived from IgD and CD8 domains, for example IgG1.

[0287] In some embodiments, the hinge is isolated or derived from CD8α or CD28. In some embodiments, the CD8α hinge comprises an amino acid sequence having at least 80% identity, at least 90% identity, at least 95% identity, at least 99% identity or is identical to a sequence of TTTPAPRPPTPAPTIASQPLSLRPEACRPAAGGAVHTRGLDFACD (SEQ ID NO: 1). In some embodiments, the CD8α hinge comprises SEQ ID NO: 1. In some embodiments, the CD8α hinge consists essentially of SEQ ID NO: 1. In some embodiments, the CD8α hinge is encoded by a nucleotide sequence having at least 80% identity, at least 90% identity, at least 95% identity, at least 99% identity or is identical to a sequence of

(SEQ ID NO: 2)
ACCACGACGCCAGCGCCGCGACCACCAACACCGGCGCCCACCATCGCGTC
GCAGCCCCTGTCCCTGCGCCCAGAGGCGTGCCGGCCAGCGGCGGGGGGCG
CAGTGCACACGAGGGGGCTGGACTTCGCCTGTGAT.

[0288] In some embodiments, the CD8α hinge is encoded by SEQ ID NO: 2.

[0289] In some embodiments, the CD28 hinge comprises an amino acid sequence having at least 80% identity, at least 90% identity, at least 95% identity, at least 99% identity or is identical to a sequence of CTIEVMYPPPYLDNEKSNGTIIHVKGKHLCPSPLFPGPSKP (SEQ ID NO: 3). In some embodiments, the CD28 hinge comprises or consists essentially of SEQ ID NO: 3. In some embodiments, the CD28 hinge is encoded by a nucleotide sequence having at least 80% identity, at least 90% identity, at least 95% identity, at least 99% identity or is identical to a sequence of

(SEQ ID NO: 4)
TGTACCATTGAAGTTATGTATCCTCCTCCTTACCTAGACAATGAGAAGAG
CAATGGAACCATTATCCATGTGAAAGGGAAACACCTTTGTCCAAGTCCCC
TATTTCCCGGACCTTCTAAGCCC.

[0290] In some embodiments, the CD28 hinge is encoded by SEQ ID NO: 4.

### Transmembrane Domain

[0291] The CARs of the present disclosure can be designed to comprise a transmembrane domain that is fused to the extracellular domain of the CAR. In some embodiments, the transmembrane domain that naturally is associated with one of the domains in the CAR is used. For example, a CAR comprising a CD28 co-stimulatory domain might also use a CD28 transmembrane domain. In some instances, the transmembrane domain can be selected or modified by amino acid substitution to avoid binding of such domains to the transmembrane domains of the same or different surface membrane proteins to minimize interactions with other members of the receptor complex.

[0292] The transmembrane domain may be derived either from a natural or from a synthetic source. Where the source is natural, the domain may be derived from any membrane-bound or transmembrane protein. Transmembrane regions may be isolated or derived from (i.e. comprise at least the transmembrane region(s) of) the alpha, beta or zeta chain of the T-cell receptor, CD28, CD3 epsilon, CD45, CD4, CDS, CD8, CD9, CD16, CD22, CD33, CD37, CD64, CD80, CD86, CD134, CD137, CD154, or from an immunoglobulin such as IgG4. Alternatively the transmembrane domain may be synthetic, in which case it will comprise predominantly hydrophobic residues such as leucine and valine. In some embodiments, a triplet of phenylalanine, tryptophan and valine will be found at each end of a synthetic transmembrane domain. Optionally, a short oligo- or polypeptide linker, preferably between 2 and 10 amino acids in length may form the linkage between the transmembrane domain and the cytoplasmic signaling domain of the CAR. A glycine-serine doublet provides a particularly suitable linker.

[0293] In some embodiments of the CARs of the disclosure, the CARs comprise a CD28 transmembrane domain. In some embodiments, the CD28 transmembrane domain comprises an amino acid sequence having at least 80% identity, at least 90% identity, at least 95% identity, at least 99% identity or is identical to a sequence of FWVLVVVGGVLACYSLLVTVAFIIFWV (SEQ ID NO: 5). In some embodiments, the CD28 transmembrane domain comprises or consists essentially of SEQ ID NO: 5. In some embodiments, the CD28 transmembrane domain is encoded by a nucleotide sequence having at least 80% identity, at least 90% identity, at least 95% identity, at least 99% identity or is identical to a sequence of

(SEQ ID NO: 6)
TTCTGGGTGCTGGTCGTTGTGGGCGGCGTGCTGGCCTGCTACAGCCTGCT
GGTGACAGTGGCCTTCATCATCTTTTGGGTG.

[0294] In some embodiments, the CD28 transmembrane domain is encoded by SEQ ID NO: 6.

[0295] In some embodiments of the CARs of the disclosure, the CARs comprise an IL-2Rbeta transmembrane domain. In some embodiments, the IL-2Rbeta transmembrane domain comprises an amino acid sequence having at least 80% identity, at least 90% identity, at least 95% identity, at least 99% identity or is identical to a sequence of IPWLGHLLVGLSGAFGFIILVYLLI (SEQ ID NO: 7). In some embodiments, the IL-2Rbeta transmembrane domain comprises or consists essentially of SEQ ID NO: 7. In some embodiments, the IL-2Rbeta transmembrane domain is encoded by a nucleotide sequence having at least 80% identity, at least 90% identity, at least 95% identity, at least 99% identity or is identical to a sequence of

(SEQ ID NO: 8)
ATTCCGTGGC TCGGCCACCT CCTCGTGGGC CTCAGCGGGG
CTTTTGGCTT CATCATCTTA GTGTACTTGC TGATC.

[0296] In some embodiments, the IL-2Rbeta transmembrane domain is encoded by SEQ ID NO: 8.

### Cytoplasmic Domain

[0297] The cytoplasmic domain or otherwise the intracellular signaling domain of the CARs of the instant invention is responsible for activation of at least one of the normal effector functions of the immune cell in which the CAR has been placed. The term “effector function” refers to a specialized function of a cell. Effector functions of a regulatory T cell, for example, include the suppression or downregulation of induction or proliferation of effector T cells. Thus the term “intracellular signaling domain” refers to the portion of a protein which transduces the effector function signal and directs the cell to perform a specialized function. While usually the entire intracellular signaling domain can be employed, in many cases it is not necessary to use the entire domain. To the extent that a truncated portion of the intracellular signaling domain is used, such truncated portion may be used in place of the intact chain as long as it transduces the effector function signal. In some cases, multiple intracellular domains can be combined to achieve the desired functions of the CAR-T cells of the instant disclosure. The term intracellular signaling domain is thus meant to include any truncated portion of one or more intracellular signaling domains sufficient to transduce the effector function signal.

[0298] Examples of intracellular signaling domains for use in the CARs of the instant disclosure include the cytoplasmic sequences of the T cell receptor (TCR) and co-receptors that act in concert to initiate signal transduction following antigen receptor engagement, as well as any derivative or variant of these sequences and any synthetic sequence that has the same functional capability. Accordingly, the intracellular domain of CARs of the instant disclosure comprises at least one cytoplasmic activation domain. In some embodiments, the intracellular activation domain ensures that there is T-cell receptor (TCR) signaling necessary to activate the effector functions of the CAR T-cell. In some embodiments, the at least one cytoplasmic activation is a CD247 molecule (CDζ) activation domain, a stimulatory killer immunoglobulin-like receptor (KIR) KIR2DS2 activation domain, or a DNAX-activating protein of 12 kDa (DAP12) activation domain. In some embodiments, the CD3 activation domain comprises an amino acid sequence having at least 80% identity, at least 90% identity, at least 95% identity, at least 99% identity or is identical to a sequence of

(SEQ ID NO: 9)
RVKFSRSADAPAYKQGQNQLYNELNLGRREEYDVLDKRRGRDPEMGGKPR
RKNPQEGLYNELQKDKMAEAYSEIGMKGERRRGKGHDGLYQGLSTATKDT
YDALHMQALPPR.

[0299] In some embodiments, the CD3 activation domain comprises or consists essentially of SEQ ID NO: 9. In some embodiments, the CD3t activation domain is encoded by a nucleotide sequence having at least 80% identity, at least 90% identity, at least 95% identity, at least 99% identity or is identical to a sequence of

(SEQ ID NO: 10)
AGAGTGAAGTTCAGCAGGAGCGCAGACGCCCCCGCGTACAAGCAGGGCCA
GAACCAGCTCTATAACGAGCTCAATCTAGGACGAAGAGAGGAGTACGATG
TTTTGGACAAGCGTAGAGGCCGGGACCCTGAGATGGGGGGAAAGCCGAGA
AGGAAGAACCCTCAGGAAGGCCTGTACAATGAACTGCAGAAAGATAAGAT
GGCGGAGGCCTACAGTGAGATTGGGATGAAAGGCGAGCGCCGGAGGGGCA
AGGGGCACGATGGCCTTTACCAGGGACTCAGTACAGCCACCAAGGACACC
TACGACGCCCTTCACATGCAGGCCCTGCCCCCTCGC.

[0300] In some embodiments, the CD3ζ activation domain is encoded by SEQ ID NO: 10.

[0301] It is known that signals generated through the TCR alone are often insufficient for full activation of the T cell and that a secondary or co-stimulatory signal is also required. Thus, T cell activation can be said to be mediated by two distinct classes of cytoplasmic signaling sequence: those that initiate antigen-dependent primary activation through the TCR (primary cytoplasmic signaling sequences) and those that act in an antigen-independent manner to provide a secondary or co-stimulatory signal (secondary cytoplasmic signaling sequences).

[0302] Primary cytoplasmic signaling sequences regulate primary activation of the TCR complex either in a stimulatory way, or in an inhibitory way. Primary cytoplasmic signaling sequences that act in a stimulatory manner may contain signaling motifs which are known as immunoreceptor tyrosine-based activation motifs or ITAMs. In some embodiments, the ITAM contains a tyrosine separated from a leucine or an isoleucine by any two other amino acids (YxxL) (SEQ ID NO: 21).

[0303] In some embodiments, the cytoplasmic domain contains 1, 2, or 3 ITAMs. In some embodiments, the cytoplasmic domain contains 1 ITAM. In some embodiments, the cytoplasmic domain contains 2 ITAMs. In some embodiments, the cytoplasmic domain contains 3 ITAMs. In some embodiments, the cytoplasmic domain contains 4 ITAMs. In some embodiments, the cytoplasmic domain contains 5 ITAMs.

[0304] In some embodiments, the cytoplasmic domain is a CD3ζ activation domain. In some embodiments, CD3ζ activation domain comprises a single ITAM. In some embodiments, CD3ζ activation domain comprises two ITAMs. In some embodiments, CD3ζ activation domain comprises three ITAMs.

[0305] In some embodiments, the CD3ζ activation domain comprising a single ITAM comprises an amino acid sequence having at least 80% identity, at least 90% identity, at least 95% identity, at least 99% identity or is identical to a sequence of RVKFSRSADAPAYQQGQNQLYNELNLGRREEYDVLHMQALPPR (SEQ ID NO: 11). In some embodiments, the CD3ζ activation domain comprises SEQ ID NO: 11. In some embodiments, the CD3ζ activation domain comprising a single ITAM consists essentially of an amino acid sequence of RVKFSRSADAPAYQQGQNQLYNELNLGRREEYDVLHMQALPPR (SEQ ID NO: 11) . In some embodiments, the CD3ζ activation domain comprising a single ITAM is encoded by a nucleotide sequence having at least 80% identity, at least 90% identity, at least 95% identity, at least 99% identity or is identical to a sequence of

(SEQ ID NO: 12)
AGAGTGAAGT TCAGCAGGAG CGCAGACGCC CCCGCGTACC
AGCAGGGCCA GAACCAGCTC TATAACGAGC TCAATCTAGG
ACGAAGAGAG GAGTACGATG TTTTGCACAT GCAGGCCCTG
CCCCCTCGC.

[0306] In some embodiments, the CD3ζ activation domain is encoded by SEQ ID NO: 12.

[0307] Further examples of ITAM containing primary cytoplasmic signaling sequences that can be used in the CARs of the instant disclosure include those derived from TCRζ, FcRγ, FcRβ, CD3γ, CD3δ, CD3ε, CD3ζ, CD5, CD22, CD79a, CD79b, and CD66d. It is particularly preferred that cytoplasmic signaling molecule in the CAR of the instant invention comprises a cytoplasmic signaling sequence derived from CD3ζ.

[0308] Co-Stimulatory Domain

[0309] In some embodiments, the cytoplasmic domain of the CAR can be designed to comprise the CD3ζ signaling domain by itself or combined with any other desired cytoplasmic domain(s) useful in the context of the CAR of the instant disclosure. For example, the cytoplasmic domain of the CAR can comprise a CD3ζ chain portion and a co-stimulatory domain. The co-stimulatory domain refers to a portion of the CAR comprising the intracellular domain of a costimulatory molecule. A costimulatory molecule is a cell surface molecule other than an antigen receptor or its ligands that is required for an efficient response of lymphocytes to an antigen. Examples of such molecules include the co-stimulatory domain is selected from the group consisting of IL-2Rβ, Fc Receptor gamma (FcRγ), Fc Receptor beta (FcRβ), CD3g molecule gamma (CD3γ), CD3δ, CD3ε, CD5 molecule (CD5), CD22 molecule (CD22), CD79a molecule (CD79a), CD79b molecule (CD79b), carcinoembryonic antigen related cell adhesion molecule 3 (CD66d), CD27 molecule (CD27), CD28 molecule (CD28), TNF receptor superfamily member 9 (4-1BB), TNF receptor superfamily member 4 (OX40), TNF receptor superfamily member 8 (CD30), CD40 molecule (CD40), programmed cell death 1 (PD-1), inducible T cell costimulatory (ICOS), lymphocyte function-associated antigen-1 (LFA-1), CD2 molecule (CD2), CD7 molecule (CD7), TNF superfamily member 14 (LIGHT), killer cell lectin like receptor C2 (NKG2C) and CD276 molecule (B7-H3) c-stimulatory domains, or functional fragments thereof.

[0310] The cytoplasmic domains within the cytoplasmic signaling portion of the CARs of the instant disclosure may be linked to each other in a random or specified order. Optionally, a short oligo- or polypeptide linker, for example between 2 and 10 amino acids in length may form the linkage. A glycine-serine doublet provides an example of a suitable linker.

[0311] In some embodiments, the intracellular domains of CARs of the instant disclosure comprise at least one co-stimulatory domain. In some embodiments, the co-stimulatory domain is isolated or derived from CD28. In some embodiments, the CD28 co-stimulatory domain comprises an amino acid sequence having at least 80% identity, at least 90% identity, at least 95% identity, at least 99% identity or is identical to a sequence of

(SEQ ID NO: 13)
RSKRSRLLHSDYMNMTPRRPGPTRKHYQPYAPPRDFAAYRS.

[0312] In some embodiments, the CD28 co-stimulatory domain comprises or consists essentially of SEQ ID NO: 13. In some embodiments, the CD28 co-stimulatory domain is encoded by a nucleotide sequence having at least 80% identity, at least 90% identity, at least 95% identity, at least 99% identity or is identical to a sequence of

(SEQ ID NO: 14)
AGGAGCAAGCGGAGCAGACTGCTGCACAGCGACTACATGAACATGACCCC
CCGGAGGCCTGGCCCCACCCGGAAGCACTACCAGCCCTACGCCCCTCCCA
GGGATTTCGCCGCCTACCGGAGC.

[0313] In some embodiments, the CD28 co-stimulatory domain is encoded by SEQ ID NO: 14.

[0314] In some embodiments, the intracellular domain of the CARs of the instant disclosure comprises an interleukin-2 receptor beta-chain (IL-2Rbeta or IL-2R-beta) cytoplasmic domain. In some embodiments, the IL-2Rbeta domain is truncated. In some embodiments, the IL-2Rbeta cytoplasmic domain comprises one or more STAT5-recruitment motifs. In some embodiments, the CAR comprises one or more STAT5-recruitment motifs outside the IL-2Rbeta cytoplasmic domain.

[0315] In some embodiments, the IL-2-Rbeta intracellular domain comprises an amino acid sequence having at least 80% identity, at least 90% identity, at least 95% identity, at least 99% identity or is identical to a sequence of

(SEQ ID NO: 15)
NCRNTGPWLKKVLKCNTPDPSKFFSQLSSEHGGDVQKWLSSPEPSSSFSP
GGLAPEISPLEVLERDKVTQLLPLNTDAYLSLQELQGQDPTHLV.

[0316] In some embodiments, the IL2R-beta intracellular domain comprises or consists essentially of SEQ ID NO: 15. In some embodiments, the IL-2R-beta intracellular domain is encoded by a nucleotide sequence having at least 80% identity, at least 90% identity, at least 95% identity, at least 99% identity or is identical to a sequence of

```
(SEQ ID NO: 16)
    1 AACTGCAGGA ACACCGGGCC ATGGCTGAAG AAGGTCCTGA AGTGTAACAC CCCAGACCCC
  61 TCGAAGTTCT TTTCCCAGCT GAGCTCAGAG CATGGAGGCG ACGTCCAGAA GTGGCTCTCT
121 TCGCCCTTCC CCTCATCGTC CTTCAGCCCT GGCGGCCTGG CACCTGAGAT CTCGCCACTA
181 GAAGTGCTGG AGAGGGACAA GGTGACGCAG CTGCTCCCCC TGAACACTGA TGCCTACTTG
241 TCTCTCCAAG AACTCCAGGG TCAGGACCCA ACTCACTTGG TG.
```

[0317] In some embodiments, the IL-2R-beta intracellular domain is encoded by SEQ ID NO: 16.

[0318] In an embodiment, the IL-2R-beta cytoplasmic domain comprises one or more STAT5-recruitment motifs. Exemplary STAT5-recruitment motifs are provided by Passerini et al. (2008) STAT5-signaling cytokines regulate the expression of FOXP3 in CD4+CD25+ regulatory T cells and CD4+CD25+ effector T cells. International Immunology, Vol. 20, No. 3, pp. 421-431, and by Kagoya et al. (2018) A novel chimeric antigen receptor containing a JAK—STAT signaling domain mediates superior antitumor effects. Nature Medicine doi:10.1038/nm.4478.

[0319] In some embodiments, the STATS-recruitment motif(s) consists of the sequence Tyr-Leu-Ser-Leu (SEQ ID NO: 17).

[0320] In some embodiments, the CAR comprises an intracellular domain isolated or derived from CD28, 4-1BB and/or CD3z, or a combination thereof. In some embodiments, the intracellular domain of the CAR comprises a CD28 co-stimulatory domain, a 4-1BB costimulatory domain, and a CD3ζ activation domain. In some embodiments, the intracellular domain of the CAR comprises a sequence of RSKRSRLLHSDYMNMTPRRPGPTRKHYQPYAPPRDFAAYRSKRGRKKLLYIFKQPFMRP VQTTQEEDGCSCRFPEEEEGGCELRVKFSRSADAPAYKQGQNQLYNELNLGRREEYDV LDKRRGRDPEMGGKPRRKNPQEGLYNELQKDKMAEAYSEIGMKGERRRGKGHDGLY QGLSTATKDTYDALHMQALPPR (SEQ ID NO: 5474), or a sequence having at least 80% identity, at least 90% identity, at least 95% identity, at least 99% identity thereto. In some embodiments, the intracellular domain of the CAR is encoded by SEQ ID NO: 5475) or a sequence having at least 80% identity, at least 90% identity, at least 95% identity, at least 99% identity thereto. In some embodiments, the intracellular domain of the CAR is encoded by SEQ ID NO: 5475.

### Inhibitory Domains

[0321] In some embodiments, for example in the second engineered receptors of the disclosure which provide an inhibitory signal, the inhibitory signal is transmitted through the intracellular domain of the receptor. In some embodiments, the engineered receptor comprises an inhibitory intracellular domain. In some embodiments, the second engineered receptor is a CAR comprising an inhibitory intracellular domain (an inhibitory CAR).

[0322] In some embodiments, the inhibitory intracellular domain comprises an immunoreceptor tyrosine-based inhibitory motif (ITIM). In some embodiments, the inhibitory intracellular domain comprising an ITIM can be isolated or derived from an immune checkpoint inhibitor such as CTLA-4 and PD-1. CTLA-4 and PD-1 are immune inhibitory receptors expressed on the surface of T cells, and play a pivotal role in attenuating or terminating T cell responses.

[0323] Inhibitory domains can be isolated from human tumor necrosis factor related apoptosis inducing ligand (TRAIL) receptor and CD200 receptor 1.

[0324] In some embodiments, the inhibitory domain comprises an intracellular domain, a transmembrane or a combination thereof. In some embodiments, the inhibitory domain comprises an intracellular domain, a transmembrane domain, a hinge region or a combination thereof. In some embodiments, the inhibitory domain comprises an immunoreceptor tyrosine-based inhibitory motif (ITIM). In some embodiments, the inhibitory domain comprising an ITIM can be isolated or derived from an immune checkpoint inhibitor such as CTLA-4 and PD-1.

[0325] Inhibitory domains can be isolated from human tumor necrosis factor related apoptosis inducing ligand (TRAIL) receptor and CD200 receptor 1. In some embodiments, the inhibitory domain is isolated or derived from a human protein, for example a human TRAIL receptor, CTLA-4, or PD-1 protein. In some embodiments, the TRAIL receptor comprises TR10A, TR10B or TR10D.

[0326] Endogenous TRAIL is expressed as a 281-amino acid type II trans-membrane protein, which is anchored to the plasma membrane and presented on the cell surface. TRAIL is expressed by natural killer cells, which, following the establishment of cell-cell contacts, can induce TRAIL-dependent apoptosis in target cells. Physiologically, the TRAIL-signaling system was shown to be essential for immune surveillance, for shaping the immune system through regulating T-helper cell 1 versus T-helper cell 2 as well as “helpless” CD8+ T-cell numbers, and for the suppression of spontaneous tumor formation.

[0327] In some embodiments, the inhibitory domain comprises an intracellular domain isolated or derived from a CD200 receptor. The cell surface glycoprotein CD200 receptor 1 (Uniprot ref: Q8TD46) represents another example of an inhibitory intracellular domain of the present invention. This inhibitory receptor for the CD200/OX2 cell surface glycoprotein limits inflammation by inhibiting the expression of proinflammatory molecules including TNF-alpha, interferons, and inducible nitric oxide synthase (iNOS) in response to selected stimuli.

[0328] In some embodiments, the engineered receptor comprises an inhibitory domain isolated or derived from killer cell immunoglobulin like receptor, three Ig domains and long cytoplasmic tail 2 (KIR3DL2), killer cell immunoglobulin like receptor, three Ig domains and long cytoplasmic tail 3 (KIR3DL3), leukocyte immunoglobulin like receptor B1 (LIR1, also called LIR-1 and LILRB1), programmed cell death 1 (PD-1), Fc gamma receptor IIB (FcgRIIB), killer cell lectin like receptor K1 (NKG2D), CTLA-4, a domain containing a synthetic consensus ITIM, a ZAP70 SH2 domain (e.g., one or both of the N and C terminal SH2 domains), or ZAP70 KI_K369A (kinase inactive ZAP70).

[0329] In some embodiments, the inhibitory domain is isolated or derived from a human protein.

[0330] In some embodiments, the second, inhibitory receptor comprises a cytoplasmic domain and transmembrane domain isolated or derived from the same protein, for example an ITIM containing protein. In some embodiments, the second, inhibitory receptor comprises a cytoplasmic domain, a transmembrane domain, and an extracellular domain or a portion thereof isolated or derived isolated or derived from the same protein, for example an ITIM containing protein. In some embodiments, the second, inhibitory receptor comprises a hinge region isolated or derived from isolated or derived from the same protein as the intracellular domain and/or transmembrane domain, for example an ITIM containing protein.

[0331] In some embodiments, the second, inhibitory engineered receptor comprises an inhibitory domain. In some embodiments, the second, inhibitory engineered receptor comprises an inhibitory intracellular domain and/or an inhibitory transmembrane domain. In some embodiments, the second engineered receptor is a CAR comprising an inhibitory domain (an inhibitory CAR). In some embodiments, the inhibitory intracellular domain is fused to the intracellular domain of a CAR. In some embodiments, the inhibitory intracellular domain is fused to the transmembrane domain of a CAR.

### T Cell Receptors (TCRs)

[0332] In some embodiments, the first or second engineered receptor is a T Cell Receptor (TCR). In some embodiments, the first and second engineered receptors are T Cell Receptors (TCR).

[0333] As used herein, a “TCR”, sometimes also called a “TCR complex” or “TCR/CD3 complex” refers to a protein complex comprising a TCR alpha chain, a TCR beta chain, and one or more of the invariant CD3 chains (zeta, gamma, delta and epsilon), sometimes referred to as subunits. The TCR alpha and beta chains can be disulfide-linked to function as a heterodimer to bind to peptide-MHC complexes. Once the TCR alpha/beta heterodimer engages peptide-MHC, conformational changes in the TCR complex in the associated invariant CD3 subunits are induced, which leads to their phosphorylation and association with downstream proteins, thereby transducing a primary stimulatory signal. In an exemplary TCR complex, the TCR alpha and TCR beta polypeptides form a heterodimer, CD3 epsilon and CD3 delta form a heterodimer, CD3 epsilon and CD3 gamma for a heterodimer, and two CD3 zeta form a homodimer.

### Extracellular Domains

[0334] The disclosure provides a first engineered receptor comprising a first extracellular ligand binding domain and a second engineered receptor comprising a second extracellular ligand binding domain. Either the first engineered receptor, the second engineered receptor, or both, may be a TCR. Any suitable ligand binding domain may be fused to an extracellular domain, hinge domain or transmembrane of the engineered TCRs described herein.

[0335] In some embodiments, the first and/or second ligand binding domain is fused to an extracellular domain of a TCR subunit. The TCR subunit can be TCR alpha, TCR beta, CD3 delta, CD3 epsilon or CD3 gamma. In some embodiments, both the first and second ligand binding domains are fused to the same TCR subunit in different TCR receptors. In some embodiments, the first and second ligand binding domains are fused to different TCR subunits in different TCR receptors. In some embodiments, the first, activator ligand binding domain is fused to a first TCR subunit in a first engineered receptor and the second, inhibitor ligand binding domain is fused to a second TCR subunit in a second engineered receptor. In some embodiments, the first and second TCR subunits are not the same subunit. In some embodiments, the first and second TCR subunits are the same subunit. For example, the first ligand binding domain can be fused to TCR alpha, and the second ligand binding domain can be fused to TCR beta. As a further example, the first ligand binding is fused to TCR beta and the second ligand binding domain used fused to TCR alpha.

[0336] In some embodiments, the first, activator LBD comprises an scFv domain and the second, inhibitor LBD comprises a Vβ-only domain. In some embodiments, the first, activator LBD comprises a Vβ-only domain and the second, inhibitor LBD comprises an scFv domain. In some embodiments, both the first, activator LBD and the second, inhibitor LBD are scFv domains. In some embodiments, both the first, activator LBD and the second, inhibitor LBD are Vβ-only domains.

[0337] In some embodiments, the first engineered TCR of the disclosure comprises an extracellular domain comprising a Vβ-only domain, a transmembrane domain and an intracellular domain. In some embodiments, the intracellular domain comprises one or more exogenous domains.

[0338] In some embodiments, the first engineered TCR of the disclosure comprises an extracellular domain comprising an scFv domain, a transmembrane domain and an intracellular domain. In some embodiments, the intracellular domain comprises one or more exogenous domains.

[0339] In some embodiments, the second engineered TCR of the disclosure comprises an extracellular domain comprising a Vβ-only domain, a transmembrane domain and an inhibitory intracellular domain.

[0340] In some embodiments, the second engineered TCR of the disclosure comprises an extracellular domain comprising an scFv domain, a transmembrane domain and an inhibitory intracellular domain.

[0341] TCR subunits include TCR alpha, TCR beta, CD3 zeta, CD3 delta, CD3 gamma and CD3 epsilon. Any one or more of TCR alpha, TCR beta chain, CD3 gamma, CD3 delta or CD3 epsilon, or fragments or derivative thereof, can be fused to one or more domains capable of providing a stimulatory signal of the disclosure, thereby enhancing TCR function and activity. Any one or more of TCR alpha, TCR beta chain, CD3 gamma, CD3 delta or CD3 epsilon, or fragments or derivative thereof, can be fused to an inhibitory intracellular domain of the disclosure.

[0342] In some embodiments, for example those embodiments wherein the first engineered receptor or second engineered receptor comprises a first and a second polypeptide, the antigen binding domain is isolated or derived from a T cell receptor (TCR) extracellular domain or an antibody.

[0343] In some embodiments, the first engineered receptor and second engineered receptor comprise a first antigen binding domain and a second antigen binding domain. The antigen-binding domain or domains of the engineered receptor may be provided on the same or a different polypeptide as the intracellular domain.

[0344] In some embodiments, the antigen-binding domain of the first and/or second engineered receptor comprises a single chain variable fragment (scFv).

[0345] In some embodiments, the first and/or second engineered receptor comprises a second polypeptide. The disclosure provides receptors having two polypeptides each having a part of a ligand-binding domain (e.g. cognates of a heterodimeric LDB, such as a TCRα/β- or Fab-based LBD). The disclosure further provides receptors having two polypeptides, each having a part of a ligand-binding domain (e.g. cognates of a heterodimeric LDB, such as a TCRα/β- or Fab-based LBD) and one part of the ligand binding domain is fused to a hinge or transmembrane domain, while the other part of the ligand binding domain has no intracellular domain. Further variations include receptors where each polypeptide has a hinge domain, and where each polypeptide has a hinge and transmembrane domain. In some embodiments, the hinge domain is absent. In other embodiments, the hinge domain is a membrane proximal extracellular region (MPER), such as the LILRB1 D3D4 domain.

[0346] In some embodiments, for example those embodiments where the first and/or second engineered receptor comprises at least two polypeptides, the first polypeptide comprises a first chain of an antibody and the second polypeptide comprise a second chain of said antibody.

[0347] In some embodiments, the receptor comprises a Fab fragment of an antibody. In embodiments, a first polypeptide comprises an antigen-binding fragment of the heavy chain of the antibody and an intracellular domain, and a second polypeptide comprises an antigen-binding fragment of the light chain of the antibody. In some embodiments, the first polypeptide comprises an antigen-binding fragment of the light chain of the antibody and the intracellular domain, and the second polypeptide comprises an antigen-binding fragment of the heavy chain of the antibody.

[0348] In some embodiments, the first and/or second engineered receptor comprises an extracellular fragment of a T cell receptor (TCR). In some embodiments, a first polypeptide comprises an antigen-binding fragment of the alpha chain of the TCR and the intracellular domain, and a second polypeptide comprises an antigen-binding fragment of the beta chain of the TCR. In some embodiments, a first polypeptide comprises an antigen-binding fragment of the beta chain of the TCR and the intracellular domain, and the second polypeptide comprises an antigen-binding fragment of the alpha chain of the TCR.

TCRs comprising Vβ-Only Domains

[0349] Certain embodiments of present disclosure relate to engineered TCRs comprising a TCR variable domain, the TCR variable domain specifically binding to an antigen in the absence of a second TCR variable domain (a Vβ-only domain).

[0350] In some embodiments, the engineered TCR comprises additional elements besides the TCR variable domain, including additional amino acid sequences, additional protein domains (covalently associated, non- covalently associated or covalently and non-covalently associated with the TCR variable domain), fusion or non-covalent association of the TCR variable domain with other types of macromolecules (for example polynucleotides, polysaccharides, lipids, or a combination thereof), fusion or non-covalent association of the TCR variable domain with one or more small molecules, compounds, or ligands, or a combination thereof. Any additional element, as described, may be combined provided that the TCR variable domain is configured to specifically bind the epitope in the absence of a second TCR variable domain.

[0351] An engineered TCR comprising a Vβ-only domain as described herein may comprise a single TCR chain (e.g. α, β, γ, or δ chain), or it may comprise a single TCR variable domain (e.g. of α, β, γ, or δ chain). If the engineered TCR is a single TCR chain, then the TCR chain comprises a transmembrane domain, a constant (or C domain) and a variable (or V domain), and does not comprise a second TCR variable domain. The engineered TCR may therefore comprise or consist of a TCR α chain, a TCR β chain, a TCR γ chain or a TCR δ chain. The engineered TCR may be a membrane bound protein. The engineered TCR may alternatively be a membrane-associated protein.

[0352] In some embodiments, the engineered TCR as described herein utilizes a surrogate α chain that lacks a V α segment, which forms activation-competent TCRs complexed with the six CD3 subunits.

[0353] In other embodiments, the engineered TCR as described herein functions independently of a surrogate α chain that lacks a Vα segment. For example, in some embodiments the one or more engineered TCRs are fused to transmembrane (e.g., CD3ζ and CD28) and intracellular domain proteins (e.g., CD3ζ, CD28, and/or 4-1BB) that are capable of activating T cells in response to antigen.

[0354] In some embodiments, the engineered TCR comprises one or more single TCR chains fused to the Vβ-only domain described herein. For example, the engineered TCR may comprise, or consist essentially of single α TCR chain, a single β TCR chain, a single γ TCR chain, or a single δ TCR chain fused to one or more Vβ-only domains.

[0355] In some embodiments, the engineered TCR engages antigen using complementarity-determining regions (CDRs). Each engineered TCR contains three complement determining regions (CDR1, CDR2, and CDR3).

[0356] The first and/or second ligand binding Vβ-only domain may be a human TCR variable domain. Alternatively, the first and/or second Vβ-only domain may be a non-human TCR variable domain. The first and/or second Vβ-only domain may be a mammalian TCR variable domain. The first and/or second Vβ-only domain may be a vertebrate TCR variable domain.

[0357] In embodiments where Vβ-only domain is incorporated into a fusion protein, for example a fusion protein comprising a TCR subunit, and optionally, an additional stimulatory intracellular domain. The fusion protein may comprise a Vβ-only domain and any other protein domain or domains.

### Transmembrane Domains

[0358] The disclosure provide a first fusion protein comprising a first, activator LBD and a second fusion protein comprising a second, inhibitor LBD and an inhibitor intracellular domain. In some embodiments, the first and second fusion proteins comprise transmembrane domains.

[0359] The disclosure provides polypeptides comprising a transmembrane domain, and an intracellular domain capable of providing a stimulatory signal or an inhibitory signal. In some embodiments, the engineered TCR comprises multiple intracellular domains capable of providing a stimulatory signal.

[0360] A “transmembrane domain”, as used herein, refers to a domain of a protein that spans membrane of the cell. Transmembrane domains typically consist predominantly of non-polar amino acids, and may traverse the lipid bilayer once or several times. Transmembrane domains usually comprise alpha helices, a configuration which maximizes internal hydrogen bonding.

[0361] Transmembrane domains isolated or derived from any source are envisaged as within the scope of the fusion proteins of the disclosure.

[0362] In some embodiments, the transmembrane domain is one that is associated with one of the other domains of the fusion protein, or isolated or derived from the same protein as one of the other domains of the fusion protein. In some embodiments, the transmembrane domain and the second intracellular domain are from the same protein, for example a TCR complex subunit such as TCR alpha, TCR beta, CD3 delta, CD3 epsilon or CD3 gamma. In some embodiments, the extracellular domain (svd-TCR), the transmembrane domain and the second intracellular domain are from the same protein, for example a TCR complex subunit such as TCR alpha, TCR beta, CD3 delta, CD3 epsilon or CD3 gamma. In other embodiments, the extracellular domain (comprising one or more ligand binding domains, such as Vβ-only domain and scFv domains), the transmembrane domain and the intracellular domain(s) are from different proteins. For example, in some embodiments the engineered svd-TCR comprises a CD28 transmembrane domain with a CD28, 4-1BB and CD3ζ intracellular domain.

[0363] The transmembrane domain may be derived either from a natural or from a recombinant source. Where the source is natural, the domain may be derived from any membrane-bound or transmembrane protein.

[0364] In some embodiments, the transmembrane domain is capable of signaling to the intracellular domain(s) whenever the TCR complex has bound to a target. A transmembrane domain of particular use in this invention may include at least the transmembrane region(s) of e.g., the alpha, beta or zeta chain of the TCR, CD3 delta, CD3 epsilon or CD3 gamma, CD28, CD3 epsilon, CD45, CD4, CD5, CD8, CD9, CD16, CD22, CD33, CD37, CD64, CD80, CD86, CD134, CD137, CD154.

[0365] In some embodiments, the transmembrane domain can be attached to the extracellular region of the fusion protein, e.g., the antigen binding domain of the TCR alpha or beta chain, via a hinge, e.g., a hinge from a human protein. For example, in one embodiment, the hinge can be a human immunoglobulin (Ig) hinge, e.g., an IgG4 hinge, or a CD8a hinge.

[0366] In some embodiments, the hinge is isolated or derived from CD8α or CD28. In some embodiments, the CD8α hinge comprises an amino acid sequence having at least 80% identity, at least 90% identity, at least 95% identity, at least 99% identity or is identical to a sequence of TTTPAPRPPTPAPTIASQPLSLRPEACRPAAGGAVHTRGLDFACD (SEQ ID NO: 1). In some embodiments, the CD8α hinge comprises SEQ ID NO: 1. In some embodiments, the CD8α hinge consists essentially of SEQ ID NO: 1. In some embodiments, the CD8α hinge is encoded by a nucleotide sequence having at least 80% identity, at least 90% identity, at least 95% identity, at least 99% identity or is identical to a sequence of:

(SEQ ID NO: 2)
ACCACGACGCCAGCGCCGCGACCACCAACACCGGCGCCCACCATCGCGT
CGCAGCCCCTGTCCCTGCGCCCAGAGGCGTGCCGGCCAGCGGCGGGGGG
CGCAGTGCACACGAGGGGGCTGGACTTCGCCTGTGAT.

[0367] In some embodiments, the CD8α hinge is encoded by SEQ ID NO: 2.

[0368] In some embodiments, the CD28 hinge comprises an amino acid sequence having at least 80% identity, at least 90% identity, at least 95% identity, at least 99% identity or is identical to a sequence of CTIEVMYPPPYLDNEKSNGTIIHVKGKHLCPSPLFPGPSKP (SEQ ID NO: 3. In some embodiments, the CD28 hinge comprises or consists essentially of SEQ ID NO: 3. In some embodiments, the CD28 hinge is encoded by a nucleotide sequence having at least 80% identity, at least 90% identity, at least 95% identity, at least 99% identity or is identical to a sequence of

(SEQ ID NO: 4)
TGTACCATTGAAGTTATGTATCCTCCTCCTTACCTAGACAATGAGAAGA
GCAATGGAACCATTATCCATGTGAAAGGGAAACACCTTTGTCCAAGTCC
CCTATTTCCCGGACCTTCTAAGCCC.

[0369] In some embodiments, the CD28 hinge is encoded by SEQ ID NO: 4.

[0370] In some embodiments, the transmembrane domain comprises a TCR alpha transmembrane domain. In some embodiments, the TCR alpha transmembrane domain comprises an amino acid sequence having at least 85% identity, at least 90% identity, at least 95% identity, at least 96% identity, at least 97% identity, at least 98% identity, at least 99% identity or is identical to a sequence of: VIGFRILLLKVAGFNLLMTLRLW (SEQ ID NO: 26). In some embodiments, the TCR alpha transmembrane domain comprises, or consists essentially of, SEQ ID NO: 26. In some embodiments, the TCR alpha transmembrane domain is encoded by a sequence of

(SEQ ID NO: 27)
GTGATTGGGTTCCGAATCCTCCTCCTGAAAGTGGCCGGGTTTAATCTGC
TCATGACGCTGCGGCTGTGG.

[0371] In some embodiments, the transmembrane domain comprises a TCR beta transmembrane domain. In some embodiments, the TCR beta transmembrane domain comprises an amino acid sequence having at least 85% identity, at least 90% identity, at least 95% identity, at least 96% identity, at least 97% identity, at least 98% identity, at least 99% identity or is identical to a sequence of: TILYEILLGKATLYAVLVSALVL (SEQ ID NO: 28). In some embodiments, the TCR beta transmembrane domain comprises, or consists essentially of, SEQ ID NO: 28. In some embodiments, the TCR beta transmembrane domain is encoded by a sequence of

(SEQ ID NO: 20)
ACCATCCTCTATGAGATCTTGCTAGGGAAGGCCACCTTGTATGCCGTGCTG
GTCAGTGCCCTCGTGCTG.

[0372] In some embodiments, the transmembrane comprises a CD3 zeta transmembrane domain. In some embodiments, the CD3 zeta transmembrane domain comprises an amino acid sequence having at least 85% identity, at least 90% identity, at least 95% identity, at least 96% identity, at least 97% identity, at least 98% identity, at least 99% identity or is identical to a sequence of: LCYLLDGILFIYGVILTALFL (SEQ ID NO: 29). In some embodiments, the CD3 zeta transmembrane domain comprises, or consists essentially of, SEQ ID NO: 29.

[0373] A transmembrane domain can include one or more additional amino acids adjacent to the transmembrane region, e.g., one or more amino acid associated with the extracellular region of the protein from which the transmembrane was derived (e.g., 1, 2, 3, 4, 5, 6, 7, 8, 9, 10 or up to 15 amino acids of the extracellular region) and/or one or more additional amino acids associated with the intracellular region of the protein from which the transmembrane protein is derived (e.g., 1, 2, 3, 4, 5, 6, 7, 8, 9, 10 or up to 15 amino acids of the intracellular region).

[0374] In some embodiments, the transmembrane domain can be selected or modified by amino acid substitution to avoid binding of such domains to the transmembrane domains of the same or different surface membrane proteins, e.g., to minimize interactions with other members of the receptor complex.

[0375] When present, the transmembrane domain may be a natural TCR transmembrane domain, a natural transmembrane domain from a heterologous membrane protein, or an artificial transmembrane domain. The transmembrane domain may be a membrane anchor domain. Without limitation, a natural or artificial transmembrane domain may comprise a hydrophobic a-helix of about 20 amino acids, often with positive charges flanking the transmembrane segment. The transmembrane domain may have one transmembrane segment or more than one transmembrane segment. Prediction of transmembrane domains/segments may be made using publicly available prediction tools (e.g. TMHMM, Krogh et al. Journal of Molecular Biology 2001; 305(3):567-580; or TMpred, Hofmann & Stoffel Biol. Chem. Hoppe-Seyler 1993; 347: 166). Non-limiting examples of membrane anchor systems include platelet derived growth factor receptor (PDGFR) transmembrane domain, glycosylphosphatidylinositol (GPI) anchor (added post-translationally to a signal sequence) and the like.

### Intracellular Domain

[0376] The disclosure provides fusion proteins comprising an intracellular domain. An “intracellular domain,” as the term is used herein, refers to an intracellular portion of a protein.

[0377] In some embodiments, the intracellular domain comprises one or more domains capable of providing a stimulatory signal to a transmembrane domain. In some embodiments, the intracellular domain comprises a first intracellular domain capable of providing a stimulatory signal and a second intracellular domain capable of providing a stimulatory signal. In other embodiments, the intracellular domain comprises a first, second and third intracellular domain capable of providing a stimulatory signal. The intracellular domains capable of providing a stimulatory signal are selected from the group consisting of a CD28 molecule (CD28) domain, a LCK proto-oncogene, Src family tyrosine kinase (Lck) domain, a TNF receptor superfamily member 9 (4-1BB) domain, a TNF receptor superfamily member 18 (GITR) domain, a CD4 molecule (CD4) domain, a CD8a molecule (CD8a) domain, a FYN proto-oncogene, Src family tyrosine kinase (Fyn) domain, a zeta chain of T cell receptor associated protein kinase 70 (ZAP70) domain, a linker for activation of T cells (LAT) domain, lymphocyte cytosolic protein 2 (SLP76) domain, (TCR) alpha, TCR beta, CD3 delta, CD3 gamma and CD3 epsilon intracellular domains.

[0378] In some embodiments, an intracellular domain comprises at least one intracellular signaling domain. An intracellular signaling domain generates a signal that promotes a function a cell, for example an immune effector function of a TCR containing cell, e.g., a TCR-expressing T-cell. In some embodiments, the intracellular domain of the fusion proteins of the disclosure includes at least one intracellular signaling domain. For example, the intracellular domains of CD3 gamma, delta or epsilon comprise signaling domains.

[0379] In some embodiments, the extracellular domain, transmembrane domain and intracellular domain are isolated or derived from the same protein, for example T-cell receptor (TCR) alpha, TCR beta, CD3 delta, CD3 gamma or CD3 epsilon.

[0380] Examples of intracellular domains for use in the fusion proteins of the disclosure include the cytoplasmic sequences of the TCR alpha, TCR beta, CD3 zeta, and 4-1BB, and the intracellular signaling co-receptors that act in concert to initiate signal transduction following antigen receptor engagement, as well as any derivative or variant of these sequences and any recombinant sequence that has the same functional capability.

[0381] In some embodiments, the intracellular signaling domain comprises a primary intracellular signaling domain. Exemplary primary intracellular signaling domains include those derived from the proteins responsible for primary stimulation, or antigen dependent stimulation.

[0382] An intracellular signaling domain is generally responsible for activation of at least one of the normal effector functions of the immune cell in which the fusion protein has been introduced. The term “effector function” refers to a specialized function of a cell. Effector function of a T-cell, for example, may be cytolytic activity or helper activity including the secretion of cytokines. Thus the term “intracellular signaling domain” refers to the portion of a protein which transduces the effector function signal and directs the cell to perform a specialized function.

[0383] While in some cases the entire intracellular signaling domain can be employed, in many cases it is not necessary to use the entire intracellular signaling domain. To the extent that a truncated portion of the intracellular signaling domain is used, such truncated portion may be used in place of the intact chain as long as it transduces the effector function signal. The term intracellular signaling domain is thus meant to include any truncated portion of the intracellular signaling domain sufficient to transduce the effector function signal.

[0384] In some embodiments, the intracellular domain comprises a CD3 delta intracellular domain. In some embodiments, the CD3 delta intracellular domain comprises an amino acid sequence having at least 85% identity, at least 90% identity, at least 95% identity, at least 96% identity, at least 97% identity, at least 98% identity, at least 99% identity or is identical to a sequence of

(SEQ ID NO: 30)
GHETGRLSGAADTQALLRNDQVYQPLRDRDDAQYSHLGGNWARNKGGSRSK
RSRLLHSDYMNMTPRRPGPTRKHYQPYAPPRDFAAYRS.

[0385] In some embodiments, the CD3 delta intracellular domain comprises or consists essentially of, SEQ ID NO: 30. In some embodiments, the CD3 delta intracellular domain is encoded by a sequence of

```
(SEQ ID NO: 31)
    1 GGACATGAGA CTGGAAGGCT GTCTGGGGCT GCCGACACAC AAGCTCTGTT GAGGAATGAC
  61 CAGGTCTATC AGCCCCTCCG AGATCGAGAT GATGCTCAGT ACAGCCACCT TGGAGGAAAC
121 TGGGCTCGGA ACAAGGGCGG AAGCAGGAGC AAGCGGAGCA GACTGCTGCA CAGCGACTAC
181 ATGAACATGA CCCCCCGGAG GCCTGGCCCC ACCCGGAAGC ACTACCAGCC CTACGCCCCT
241 CCCAGGGATT TCGCCGCCTA CCGGAGCTA.
```

[0386] In some embodiments, the intracellular domain comprises a CD3 epsilon intracellular domain. In some embodiments, the CD3 epsilon intracellular domain comprises an amino acid sequence having at least 85% identity, at least 90% identity, at least 95% identity, at least 96% identity, at least 97% identity, at least 98% identity, at least 99% identity or is identical to a sequence of: KNRKAKAKPVTRGAGAGGRQRGQNKERPPPVPNPDYEPIRKGQRDLYSGLNQRRIGGS RSKRSRLLHSDYMNMTPRRPGPTRKHYQPYAPPRDFAAYRS (SEQ ID NO: 32). In some embodiments, the CD3 epsilon intracellular domain comprises or consists essentially of, SEQ ID NO: 32. In some embodiments, the CD3 epsilon intracellular domain is encoded by a sequence of

```
(SEQ ID NO: 19)
    1 AAGAATAGAA AGGCCAAGGC CAAGCCTGTG ACACGAGGAG CGGGTGCTGG CGGCAGGCAA
  61 AGGGGACAAA ACAAGGAGAG GCCACCACCT GTTCCCAACC CAGACTATGA GCCCATCCGG
121 AAAGGCCAGC GGGACCTGTA TTCTGGCCTG AATCAGCGCA GAATCGGCGG AAGCAGGAGC
181 AAGCGGAGCA GACTGCTGCA CAGCGACTAC ATGAACATGA CCCCCCGGAG GCCTGGCCCC
241 ACCCGGAAGC ACTACCAGCC CTACGCCCCT CCCAGGGATT TCGCCGCCTA CCGGAGCTAG.
```

[0387] In some embodiments, the intracellular domain comprises a CD3 gamma intracellular domain. In some embodiments, the CD3 gamma intracellular domain comprises an amino acid sequence having at least 85% identity, at least 90% identity, at least 95% identity, at least 96% identity, at least 97% identity, at least 98% identity, at least 99% identity or is identical to a sequence of

(SEQ ID NO: 33)
GQDGVRQSRASDKQTLLPNDQLYQPLKDREDDQYSHLQGNQLRRNGGSRSK
RSRLLHSDYMNMTPRRPGPTRKHYQPYAPPRDFAAYRS.

[0388] In some embodiments, the CD3 gamma intracellular domain comprises, or consists essentially of, SEQ ID NO: 33. In some embodiments, the CD3 gamma intracellular domain is encoded by a sequence of

```
(SEQ ID NO: 22)
    1 GGACAGGATG GAGTTCGCCA GTCGAGAGCT TCAGACAAGC AGACTCTGTT GCCCAATGAC
  61 CAGCTCTACC AGCCCCTCAA GGATCGAGAA GATGACCAGT ACAGCCACCT TCAAGGAAAC
121 CAGTTGAGGA GGAATGGCGG AAGCAGGAGC AAGCGGAGCA GACTGCTGCA CAGCGACTAC
181 ATGAACATGA CCCCCCGGAG GCCTGGCCCC ACCCGGAAGC ACTACCAGCC CTACGCCCCT
241 CCCAGGGATT TCGCCGCCTA CCGGAGCTAG.
```

[0389] In some embodiments, the intracellular domain comprises a CD3 zeta intracellular domain. In some embodiments, the CD3 zeta intracellular domain comprises an amino acid sequence having at least 85% identity, at least 90% identity, at least 95% identity, at least 96% identity, at least 97% identity, at least 98% identity, at least 99% identity or is identical to a sequence of RVKF SRSADAPAYKQGQNQLYNELNLGRREEYDVLDKRRGRDPEMGGKPRRKNPQEG LYNELQKDKMAEAYSEIGMKGERRRGKGHDGLYQGL S TATKDTYDALHMQALPPR (SEQ ID NO: 9) or a subsequence thereof.

[0390] In some embodiments, the CD3 zeta intracellular domain comprises, or consists essentially of, SEQ ID NO: 9.

[0391] In some embodiments, the intracellular domain comprises a TCR alpha intracellular domain. In some embodiments, a TCR alpha intracellular domain comprises Ser-Ser. In some embodiments, a TCR alpha intracellular domain is encoded by a sequence of TCCAGC.

[0392] In some embodiments, the intracellular domain comprises a TCR beta intracellular domain. In some embodiments, the TCR beta intracellular domain comprises an amino acid sequence having at least 80% identity, at least 90% identity, or is identical to a sequence of: MAMVKRKDSR (SEQ ID NO: 35). In some embodiments, the TCR beta intracellular domain comprises, or consists essentially of SEQ ID NO: 35. In some embodiments, the TCR beta intracellular domain is encoded by a sequence of

(SEQ ID NO: 36)
ATGGCCATGGTCAAGAGAAAGGATTCCAGA.

[0393] In some embodiments, the intracellular signaling domain comprises at least one stimulatory intracellular domain. In some embodiments, the intracellular signaling domain comprises a primary intracellular signaling domain, such as a CD3 delta, CD3 gamma and CD3 epsilon intracellular domain, and one additional stimulatory intracellular domain, for example a co-stimulatory domain. In some embodiments, the intracellular signaling domain comprises a primary intracellular signaling domain, such as a CD3 delta, CD3 gamma and CD3 epsilon intracellular domain, and two additional stimulatory intracellular domains.

[0394] Exemplary co-stimulatory intracellular signaling domains include those derived from proteins responsible for co-stimulatory signals, or antigen independent stimulation.

[0395] The term “co-stimulatory molecule” refers to the cognate binding partner on a T-cell that specifically binds with a co-stimulatory ligand, thereby mediating a co-stimulatory response by the T-cell, such as, but not limited to, proliferation. Co-stimulatory molecules are cell surface molecules other than antigen receptors. Co-stimulatory molecules and their ligands are required for an efficient immune response. Co-stimulatory molecules include, but are not limited to an MHC class I molecule, BTLA, a Toll ligand receptor, as well as DAP10, DAP12, CD30, LIGHT, OX40, CD2, CD27, CDS, ICAM-1, LFA-1 (CD11a/CD18) 4-1BB (CD137, TNF receptor superfamily member 9), and CD28 molecule (CD28).

[0396] A “co-stimulatory domain”, sometimes referred to as “a co-stimulatory intracellular signaling domain” can be the intracellular portion of a co-stimulatory protein. A co-stimulatory domain can be a domain of a co-stimulatory protein that transduces the co-stimulatory signal. A co-stimulatory protein can be represented in the following protein families: TNF receptor proteins, Immunoglobulin-like proteins, cytokine receptors, integrins, signaling lymphocytic activation molecules (SLAM proteins), and activating NK cell receptors. Examples of such molecules include CD27, CD28, 4-1BB (CD137), OX40, GITR, CD30, CD40, ICOS, BAFFR, HVEM, lymphocyte function-associated antigen-1 (LFA-1), CD2, CD7, LIGHT, NKG2C, SLAMF7, NKp80, CD160, B7-H3, a ligand that specifically binds with CD83, CD4, and the like. The co-stimulatory domain can comprise the entire intracellular portion, or the entire native intracellular signaling domain, of the molecule from which it is derived, or a functional fragment thereof.

[0397] In some embodiments, the stimulatory domain comprises a co-stimulatory domain. In some embodiments, the co-stimulatory domain comprises a CD28 or 4-1BB co-stimulatory domain. CD28 and 4-1BB are well characterized co-stimulatory molecules required for full T cell activation and known to enhance T cell effector function. For example, CD28 and 4-1BB have been utilized in chimeric antigen receptors (CARs) to boost cytokine release, cytolytic function, and persistence over the first-generation CAR containing only the CD3 zeta signaling domain. Likewise, inclusion of co-stimulatory domains, for example CD28 and 4-1BB domains, in engineered TCR can increase T cell effector function and specifically allow co-stimulation in the absence of co-stimulatory ligand, which is typically down-regulated on the surface of tumor cells.

[0398] In some embodiments, the stimulatory domain comprises a CD28 intracellular domain. In some embodiments, the CD28 intracellular domain comprises an amino acid sequence having at least 85% identity, at least 90% identity, at least 95% identity, at least 96% identity, at least 97% identity, at least 98% identity, at least 99% identity or is identical to a sequence of: RSKRSRLLHSDYMNMTPRRPGPTRKHYQPYAPPRDFAAYRS (SEQ ID NO: 37). In some embodiments, the CD28 intracellular domain comprises, or consists essentially of, RSKRSRLLHSDYMNMTPRRPGPTRKHYQPYAPPRDFAAYRS (SEQ ID NO: 37). In some embodiments, a CD28 intracellular domain is encoded by a nucleotide sequence comprising:

(SEQ ID NO: 38)
AGGAGCAAGCGGAGCAGACTGCTGCACAGCGACTACATGAACATGACCCCC
CGGAGGCCTGGCCCCACCCGGAAGCACTACCAGCCCTACGCCCCTCCCAGG
GATTTCGCCGCCTACCGGAGC.

[0399] In some embodiments, the stimulatory domain comprises a 4-1BB intracellular domain. In some embodiments, the 4-1BB intracellular domain comprises an amino acid sequence having at least 85% identity, at least 90% identity, at least 95% identity, at least 96% identity, at least 97% identity, at least 98% identity, at least 99% identity or is identical to a sequence of: KRGRKKLLYIFKQPFMRPVQTTQEEDGCSCRFPEEEEGGCEL (SEQ ID NO: 39). In some embodiments, the 4-1BB intracellular domain comprises, or consists essentially of, KRGRKKLLYIFKQPFMRPVQTTQEEDGCSCRFPEEEEGGCEL (SEQ ID NO: 39). In some embodiments, a 4-1BB intracellular domain is encoded by a nucleotide sequence comprising:

(SEQ ID NO: 40)
AAACGGGGCAGAAAGAAACTCCTGTATATATTCAAACAACCATTTATGAG
GCCAGTACAAACTACTCAAGAGGAAGATGGCTGTAGCTGCCGATTTCCAG
AAGAAGAAGAAGGAGGATGTGAACTG.

### Inhibitory Domains

[0400] The disclosure provides inhibitory intracellular domains which can be fused to the transmembrane or intracellular domain of any of the TCR subunits to generate an inhibitory TCR. In those embodiments where the inhibitory receptor is an inhibitory CAR, the same intracellular domains described below to generate an inhibitory TCR can also be used to generate an inhibitory CAR.

[0401] In some embodiments, the inhibitory intracellular domain comprises an immunoreceptor tyrosine-based inhibitory motif (ITIM). In some embodiments, the inhibitory intracellular domain comprising an ITIM can be isolated or derived from an immune checkpoint inhibitor such as CTLA-4 and PD-1. CTLA-4 and PD-1 are immune inhibitory receptors expressed on the surface of T cells, and play a pivotal role in attenuating or terminating T cell responses.

[0402] Inhibitory domains can be isolated from human tumor necrosis factor related apoptosis inducing ligand (TRAIL) receptor and CD200 receptor 1.

[0403] In some embodiments, the inhibitory domain comprises an intracellular domain, a transmembrane or a combination thereof. In some embodiments, the inhibitory domain comprises an intracellular domain, a transmembrane domain, a hinge region or a combination thereof. In some embodiments, the inhibitory domain comprises an immunoreceptor tyrosine-based inhibitory motif (ITIM). In some embodiments, the inhibitory domain comprising an ITIM can be isolated or derived from an immune checkpoint inhibitor such as CTLA-4 and PD-1.

[0404] Inhibitory domains can be isolated from human tumor necrosis factor related apoptosis inducing ligand (TRAIL) receptor and CD200 receptor 1. In some embodiments, the inhibitory domain is isolated or derived from a human protein, for example a human TRAIL receptor, CTLA-4, or PD-1 protein. In some embodiments, the TRAIL receptor comprises TR10A, TR10B or TR10D.

[0405] Endogenous TRAIL is expressed as a 281-amino acid type II trans-membrane protein, which is anchored to the plasma membrane and presented on the cell surface. TRAIL is expressed by natural killer cells, which, following the establishment of cell-cell contacts, can induce TRAIL-dependent apoptosis in target cells. Physiologically, the TRAIL-signaling system was shown to be essential for immune surveillance, for shaping the immune system through regulating T-helper cell 1 versus T-helper cell 2 as well as “helpless” CD8+ T-cell numbers, and for the suppression of spontaneous tumor formation.

[0406] In some embodiments, the inhibitory domain comprises an intracellular domain isolated or derived from a CD200 receptor. The cell surface glycoprotein CD200 receptor 1 (Uniprot ref: Q8TD46) represents another example of an inhibitory intracellular domain of the present invention. This inhibitory receptor for the CD200/OX2 cell surface glycoprotein limits inflammation by inhibiting the expression of proinflammatory molecules including TNF-alpha, interferons, and inducible nitric oxide synthase (iNOS) in response to selected stimuli.

[0407] In some embodiments, the engineered receptor comprises an inhibitory domain isolated or derived from killer cell immunoglobulin like receptor, three Ig domains and long cytoplasmic tail 2 (KIR3DL2), killer cell immunoglobulin like receptor, three Ig domains and long cytoplasmic tail 3 (KIR3DL3), leukocyte immunoglobulin like receptor B1 (LIR1), programmed cell death 1 (PD-1), Fc gamma receptor IIB (FcgRIIB), killer cell lectin like receptor K1 (NKG2D), CTLA-4, a domain containing a synthetic consensus ITIM, a ZAP70 SH2 domain (e.g., one or both of the N and C terminal SH2 domains), or ZAP70 KI_K369A(kinase inactive ZAP70).

[0408] In some embodiments, the inhibitory domain is isolated or derived from a human protein.

[0409] In some embodiments, the second, inhibitory receptor comprises a cytoplasmic domain and transmembrane domain isolated or derived from the same protein, for example an ITIM containing protein. In some embodiments, the second, inhibitory receptor comprises a cytoplasmic domain, a transmembrane domain, and an extracellular domain or a portion thereof isolated or derived isolated or derived from the same protein, for example an ITIM containing protein. In some embodiments, the second, inhibitory receptor comprises a hinge region isolated or derived from isolated or derived from the same protein as the intracellular domain and/or transmembrane domain, for example an ITIM containing protein.

[0410] In some embodiments, the second engineered receptor is a TCR comprising an inhibitory domain (an inhibitory TCR). In some embodiments, the inhibitory TCR comprises an inhibitory intracellular domain and/or an inhibitory transmembrane domain. In some embodiments, the inhibitory intracellular domain is fused to the intracellular domain of TCR alpha, TCR beta, CD3 delta, CD3 gamma or CD3 epsilon or a portion thereof a TCR. In some embodiments, the inhibitory intracellular domain is fused to the transmembrane domain of TCR alpha, TCR beta, CD3 delta, CD3 gamma or CD3 epsilon.

[0411] In some embodiments, the second engineered receptor is a TCR comprising an inhibitory domain (an inhibitory TCR). In some embodiments, the inhibitory domain is isolated or derived from LILRB 1.

### LILRB 1 Inhibitory Receptors

[0412] The disclosure provides a second, inhibitory receptor comprising a LILRB 1 inhibitory domain, and optionally, a LILRB 1 transmembrane and/or hinge domain, or functional variants thereof. The second, inhibitory receptor can be a CAR or TCR. The inclusion of the LILRB1 transmembrane domain and/or the LILRB1 hinge domain in the inhibitory receptor may increase the inhibitory signal generated by the inhibitory receptor compared to a reference inhibitory receptor having another transmembrane domain or another hinge domains. The second, inhibitory receptor comprising the LILRB 1 inhibitory domain may be a CAR or TCR, as described herein. Any suitable ligand binding domain, as described herein, may be fused to the LILRB1-based second, inhibitory receptors.

[0413] Leukocyte immunoglobulin-like receptor subfamily B member 1 (LILRB 1), also known as Leukocyte immunoglobulin-like receptor B1, as well as ILT2, LIR1, MIR7, PIRB, CD85J, ILT-2 LIR-1, MIR-7 and PIR-B, is a member of the leukocyte immunoglobulin-like receptor (LIR) family. The LILRB1 protein belongs to the subfamily B class of LIR receptors. These receptors contain two to four extracellular immunoglobulin domains, a transmembrane domain, and two to four cytoplasmic immunoreceptor tyrosine-based inhibitory motifs (ITIMs). The LILRB1 receptor is expressed on immune cells, where it binds to MEW class I molecules on antigen-presenting cells and transduces a negative signal that inhibits stimulation of an immune response. LILRB1 is thought to regulate inflammatory responses, as well as cytotoxicity, and to play a role in limiting auto-reactivity. Multiple transcript variants encoding different isoforms of LILRB1 exist, all of which are contemplated as within the scope of the instant disclosure.

[0414] In some embodiments of the inhibitory receptors described herein, the inhibitory receptor comprises one or more domains isolated or derived from LILRB1. In some embodiments of the receptors having one or more domains isolated or derived from LILRB1, the one or more domains of LILRB1 comprise an amino acid sequence that is at least 80%, at least 90%, at least 95%, at least 96%, at least 97%, at least 98%, at least 99% or is identical to a sequence or subsequence of SEQ ID NO: 65. In some embodiments, the one or more domains of LILRB1 comprise an amino acid sequence that is identical to a sequence or subsequence of SEQ ID NO: 65. In some embodiments, the one or more domains of LILRB1 consist of an amino acid sequence that is at least 80%, at least 90%, at least 95%, at least 96%, at least 97%, at least 98%, at least 99% or is identical to a sequence or subsequence of SEQ ID NO: 65. In some embodiments, the one or more domains of LILRB1 consist of an amino acid sequence that is identical to a sequence or subsequence of SEQ ID NO: 65.

[0415] In some embodiments of the receptors having one or more domains isolated or derived from LILRB1, the one or more domains of LILRB1 are encoded by a polynucleotide sequence that is at least 80%, at least 90%, at least 95%, at least 96%, at least 97%, at least 98%, at least 99% or is identical to a sequence or subsequence of SEQ ID NO: 66.

[0416] In some embodiments of the receptors having one or more domains of LILRB1, the one or more domains of LILRB1 are encoded by a polynucleotide sequence that is identical to a sequence or subsequence of SEQ ID NO: 66.

[0417] In various embodiments, an inhibitory receptor is provided, comprising a polypeptide, wherein the polypeptide comprises one or more of: an LILRB1 hinge domain or functional fragment or variant thereof; an LILRB1 transmembrane domain or a functional variant thereof; and an LILRB1 intracellular domain or an intracellular domain comprising at least one, or at least two immunoreceptor tyrosine-based inhibitory motifs (ITIMs), wherein each ITIM is independently selected from NLYAAV (SEQ ID NO: 67), VTYAEV (SEQ ID NO: 68), VTYAQL (SEQ ID NO: 69), and SIYATL (SEQ ID NO: 70).

[0418] As used herein an “immunoreceptor tyrosine-based inhibitory motif” or “ITIM” refers to a conserved sequence of amino acids with a consensus sequence of S/I/V/LxYxxI/V/L (SEQ ID NO: 274), or the like, that is found in the cytoplasmic tails of many inhibitory receptors of the immune system. After ITIM-possessing inhibitory receptors interact with their ligand, the ITIM motif is phosphorylated, allowing the inhibitory receptor to recruit other enzymes, such as the phosphotyrosine phosphatases SHP-1 and SHP-2, or the inositol-phosphatase called SHIP.

[0419] In some embodiments, the polypeptide comprises an intracellular domain comprising at least one immunoreceptor tyrosine-based inhibitory motif (ITIM), at least two ITIMs, at least 3 ITIMs, at least 4 ITIMs, at least 5 ITIMs or at least 6 ITIMs. In some embodiments, the intracellular domain has 1, 2, 3, 4, 5, or 6 ITIMs.

[0420] In some embodiments, the polypeptide comprises an intracellular domain comprising at least one ITIM selected from the group of ITIMs consisting of NLYAAV (SEQ ID NO: 67), VTYAEV (SEQ ID NO: 68), VTYAQL (SEQ ID NO: 69), and SIYATL (SEQ ID NO: 70).

[0421] In further particular embodiments, the polypeptide comprises an intracellular domain comprising at least two immunoreceptor tyrosine-based inhibitory motifs (ITIMs), wherein each ITIM is independently selected from NLYAAV (SEQ ID NO: 67), VTYAEV (SEQ ID NO: 68), VTYAQL (SEQ ID NO: 69), and SIYATL (SEQ ID NO: 70).

[0422] In some embodiments, the intracellular domain comprises both ITIMs NLYAAV (SEQ ID NO: 67) and VTYAEV (SEQ ID NO: 68). In some embodiments, the intracellular domain comprises a sequence at least 95% identical to SEQ ID NO: 71. In some embodiments, the intracellular domain comprises or consists essentially of a sequence identical to SEQ ID NO: 71.

[0423] In some embodiments, the intracellular domain comprises both ITIMs VTYAEV (SEQ ID NO: 68) and VTYAQL (SEQ ID NO: 69). In some embodiments, the intracellular domain comprises a sequence at least 95% identical to SEQ ID NO: 72. In some embodiments, the intracellular domain comprises or consists essentially of a sequence identical to SEQ ID NO: 72.

[0424] In some embodiments, the intracellular domain comprises both ITIMs VTYAQL (SEQ ID NO: 69) and SIYATL (SEQ ID NO: 70). In some embodiments, the intracellular domain comprises a sequence at least 95% identical to SEQ ID NO: 73. In some embodiments, the intracellular domain comprises or consists essentially of a sequence identical to SEQ ID NO: 73.

[0425] In some embodiments, the intracellular domain comprises the ITIMs NLYAAV (SEQ ID NO: 67), VTYAEV (SEQ ID NO: 68), and VTYAQL (SEQ ID NO: 69). In some embodiments, the intracellular domain comprises a sequence at least 95% identical to SEQ ID NO: 74. In some embodiments, the intracellular domain comprises or consists essentially of a sequence identical to SEQ ID NO: 74.

[0426] In some embodiments, the intracellular domain comprises the ITIMs VTYAEV (SEQ ID NO: 68), VTYAQL (SEQ ID NO: 69), and SIYATL (SEQ ID NO: 70). In some embodiments, the intracellular domain comprises a sequence at least 95% identical to SEQ ID NO: 75. In some embodiments, the intracellular domain comprises or consists essentially of a sequence identical to SEQ ID NO: 75.

[0427] In some embodiments, the intracellular domain comprises the ITIMs NLYAAV (SEQ ID NO: 67), VTYAEV (SEQ ID NO: 68), VTYAQL (SEQ ID NO: 69), and SIYATL (SEQ ID NO: 70). In embodiments, the intracellular domain comprises a sequence at least 95% identical to SEQ ID NO: 76. In some embodiments, the intracellular domain comprises or consists essentially of a sequence identical to SEQ ID NO: 76.

[0428] In some embodiments, the intracellular domain comprises a sequence at least 95% identical to the LILRB1 intracellular domain (SEQ ID NO: 81). In some embodiments, the intracellular domain comprises or consists essentially of a sequence identical to the LILRB1 intracellular domain (SEQ ID NO: 81).

[0429] LILRB1 intracellular domains or functional variants thereof of the disclosure can have at least 1, at least 2, at least 4, at least 4, at least 5, at least 6, at least 7, or at least 8 ITIMs. In some embodiments, the LILRB1 intracellular domain or functional variant thereof has 2, 3, 4, 5, or 6 ITIMs.

[0430] In particular embodiments, the intracellular domain comprises two, three, four, five, or six immunoreceptor tyrosine-based inhibitory motifs (ITIMs), wherein each ITIM is independently selected from NLYAAV (SEQ ID NO: 67), VTYAEV (SEQ ID NO: 68), VTYAQL (SEQ ID NO: 69), and SIYATL (SEQ ID NO: 70).

[0431] In particular embodiments, the intracellular domain comprises at least three immunoreceptor tyrosine-based inhibitory motifs (ITIMs), wherein each ITIM is independently selected from NLYAAV (SEQ ID NO: 67), VTYAEV (SEQ ID NO: 68), VTYAQL (SEQ ID NO: 69), and SIYATL (SEQ ID NO: 70).

[0432] In particular embodiments, the intracellular domain comprises three immunoreceptor tyrosine-based inhibitory motifs (ITIMs), wherein each ITIM is independently selected from

(SEQ ID NO: 67)
NLYAAV,
(SEQ ID NO: 68)
VTYAEV,
(SEQ ID NO: 69)
VTYAQL,
and
(SEQ ID NO: 70)
SIYATL.

[0433] In particular embodiments, the intracellular domain comprises four immunoreceptor tyrosine-based inhibitory motifs (ITIMs), wherein each ITIM is independently selected from

(SEQ ID NO: 67)
NLYAAV,
(SEQ ID NO: 68)
VTYAEV,
(SEQ ID NO: 69)
VTYAQL,
and
(SEQ ID NO: 70)
SIYATL.

[0434] In particular embodiments, the intracellular domain comprises five immunoreceptor tyrosine-based inhibitory motifs (ITIMs), wherein each ITIM is independently selected from

(SEQ ID NO: 67)
NLYAAV,
(SEQ ID NO: 68)
VTYAEV,
(SEQ ID NO: 69)
VTYAQL,
and
(SEQ ID NO: 70)
SIYATL.

[0435] In particular embodiments, the intracellular domain comprises six immunoreceptor tyrosine-based inhibitory motifs (ITIMs), wherein each ITIM is independently selected from

(SEQ ID NO: 67)
NLYAAV,
(SEQ ID NO: 68)
VTYAEV,
(SEQ ID NO: 69)
VTYAQL,
and
(SEQ ID NO: 70)
SIYATL.

[0436] In particular embodiments, the intracellular domain comprises at least seven immunoreceptor tyrosine-based inhibitory motifs (ITIMs), wherein each ITIM is independently selected from NLYAAV (SEQ ID NO: 67), VTYAEV (SEQ ID NO: 68), VTYAQL (SEQ ID NO: 69), and SIYATL (SEQ ID NO: 70).

[0437] The LILRB1 protein has four immunoglobulin (Ig) like domains termed D1, D2, D3 and D4. In some embodiments, the LILRB1 hinge domain comprises an LILRB1 D3D4 domain or a functional variant thereof. In some embodiments, the LILRB1 D3D4 domain comprises a sequence at least 95%, at least 96%, at least 97%, at least 98%, at least 99% or identical to SEQ ID NO: 77. In some embodiments, the LILRB1 D3D4 domain comprises or consists essentially of SEQ ID NO: 77.

[0438] In some embodiments, the polypeptide comprises the LILRB1 hinge domain or functional fragment or variant thereof. In embodiments, the LILRB1 hinge domain or functional fragment or variant thereof comprises a sequence at least 95%, at least 96%, at least 97%, at least 98%, at least 99% identical or identical to SEQ ID NO: 84, SEQ ID NO: 77, or SEQ ID NO: 78. In embodiments, the LILRB1 hinge domain or functional fragment or variant thereof comprises a sequence at least 95% identical to SEQ ID NO: 84, SEQ ID NO: 77, or SEQ ID NO: 78.

[0439] In some embodiments, the LILRB1 hinge domain comprises a sequence identical to SEQ ID NO: 84, SEQ ID NO: 77, or SEQ ID NO: 78.

[0440] In some embodiments, the LILRB1 hinge domain consists essentially of a sequence identical to SEQ ID NO: 84, SEQ ID NO: 77, or SEQ ID NO: 78.

[0441] In some embodiments, the transmembrane domain is a LILRB1 transmembrane domain or a functional variant thereof. In some embodiments, the LILRB1 transmembrane domain or a functional variant thereof comprises a sequence at least 95% identical, at least 96% identical, at least 97% identical, at least 98% identical or at least 99% to SEQ ID NO: 85. In some embodiments, the LILRB1 transmembrane domain or a functional variant thereof comprises a sequence at least 95% identical to SEQ ID NO: 85. In some embodiments, the LILRB1 transmembrane domain comprises a sequence identical to SEQ ID NO: 85. In embodiments, the LILRB1 transmembrane domain consists essentially of a sequence identical to SEQ ID NO: 85.

[0442] In some embodiments, the transmembrane domain can be attached to the extracellular region of the second, inhibitory receptor, e.g., the antigen binding domain or ligand binding domain, via a hinge, e.g., a hinge from a human protein. For example, in some embodiments, the hinge can be a human immunoglobulin (Ig) hinge, e.g., an IgG4 hinge, a CD8a hinge or an LILRB1 hinge.

[0443] In some embodiments, the second, inhibitory receptor comprises an inhibitory domain. In some embodiments, the second, inhibitory receptor comprises an inhibitory intracellular domain and/or an inhibitory transmembrane domain. In some embodiments, the inhibitory domain is isolated or derived from LILR1B.

[0444] Inhibitory Receptors Comprising Combinations of LILRB1 Domains

[0445] In some embodiments, the LILRB1-based inhibitory receptors of the disclosure comprise more than one LILRB1 domain or functional equivalent thereof. For example, in some embodiments, the inhibitory receptor comprises an LILRB1 transmembrane domain and intracellular domain, or an LILRB1 hinge domain, transmembrane domain and intracellular domain.

[0446] In particular embodiments, the inhibitory receptor comprises an LILRB1 hinge domain or functional fragment or variant thereof, and the LILRB1 transmembrane domain or a functional variant thereof. In some embodiments, the polypeptide comprises a sequence at least 95% identical, at least 96% identical, at least 97% identical, at least 98% identical, at least 99% identical or identical to SEQ ID NO: 79. In some embodiments, the polypeptide comprises a sequence at least 95% identical to SEQ ID NO: 79. In some embodiments, the polypeptide comprises a sequence identical to SEQ ID NO: 79.

[0447] In further embodiments, the inhibitory receptor comprises: the LILRB1 transmembrane domain or a functional variant thereof, and an LILRB1 intracellular domain and/or an intracellular domain comprising at least one immunoreceptor tyrosine-based inhibitory motif (ITIM), wherein the ITIM is selected from NLYAAV (SEQ ID NO: 67), VTYAEV (SEQ ID NO: 68), VTYAQL (SEQ ID NO: 69), and SIYATL (SEQ ID NO: 70). In some embodiments, the polypeptide comprises the LILRB1 transmembrane domain or a functional variant thereof, and an LILRB1 intracellular domain and/or an intracellular domain comprising at least two ITIM, wherein each ITIM is independently selected from NLYAAV (SEQ ID NO: 67), VTYAEV (SEQ ID NO: 68), VTYAQL (SEQ ID NO: 69), and SIYATL (SEQ ID NO: 70).

[0448] In some embodiments, the inhibitory receptor comprises a LILRB1 transmembrane domain and intracellular domain. In some embodiments, the polypeptide comprises a sequence at least 95% identical, at least 96% identical, at least 97% identical, at least 98% identical, at least 99% identical or identical to SEQ ID NO: 80. In some embodiments, the polypeptide comprises a sequence at least 95% identical to SEQ ID NO: 80. In some embodiments, the polypeptide comprises a sequence identical to SEQ ID NO: 80. In some embodiments, the inhibitory receptor comprises the LILRB1 transmembrane domain and intracellular domain of SEQ ID NO: 80 fused to an extracellular ligand binding domain. In some embodiments, the inhibitory receptor comprises a first polypeptide comprising SEQ ID NO: 80 fused to a TCR alpha variable domain, and a second polypeptide comprising SEQ ID NO: 80 fused to a TCR beta variable domain.

[0449] In preferred embodiments, the inhibitory receptor comprises: an LILRB1 hinge domain or functional fragment or variant thereof; an LILRB1 transmembrane domain or a functional variant thereof; and an LILRB1 intracellular domain and/or an intracellular domain comprising at least two immunoreceptor tyrosine-based inhibitory motifs (ITIMs), wherein each ITIM is independently selected from LYAAV (SEQ ID NO: 67), VTYAE (SEQ ID NO: 68), VTYAQL (SEQ ID NO: 69), and SIYATL (SEQ ID NO: 11).

[0450] In some embodiments, the inhibitory receptor comprises a sequence at least 95% identical to SEQ ID NO: 82 or SEQ ID NO: 83, or at least 99% identical to SEQ ID NO: 82 or SEQ ID NO: 83, or identical to SEQ ID NO: 82 or SEQ ID NO: 83.

[0451] In some embodiments, the polypeptide comprises a sequence at least 99% identical to SEQ ID NO: 79, or at least 99% identical to SEQ ID NO: 79, or identical to SEQ ID NO: 79.

[0452] In some embodiments, the polypeptide comprises a sequence at least 99% identical to SEQ ID NO: 80, or at least 99% identical to SEQ ID NO: 80, or identical to SEQ ID NO: 80.

TABLE 13
Polypeptide sequences for illustrative LILRB1-based inhibitory receptors

| Name | Sequence |
|---|---|
| LILRB1 | MTPILTVLICLGLSLGPRTHVQAGHLPKPTLWAEPGSVITQGSPVTLRCQ |
| | GGQETQEYRLYREKKTALWITRIPQELVKKGQFPIPSITWEHAGRYRCYY |
| | GSDTAGRSESSDPLELVVTGAYIKPTLSAQPSPVVNSGGNVILQCDSQV |
| | AFDGFSLCKEGEDEHPQCLNSQPHARGSSRAIFSVGPVSPSRRWWYRC |
| | YAYDSNSPYEWSLPSDLLELLVLGVSKKPSLSVQPGPIVAPEETLTLQCGS |
| | DAGYNRFVLYKDGERDFLQLAGAQPQAGLSQANFTLGPVSRSYGGQY |
| | RCYGAHNLSSEWSAPSDPLDILIAGQFYDRVSLSVQPGPTVASGENVTLL |
| | CQSQGWMQTFLLTKEGAADDPWRLRSTYQSQKYQAEFPMGPVTSAH |
| | AGTYRCYGSQSSKPYLLTHPSDPLELVVSGPSGGPSSPTTGPTSTSGPED |
| | QPLTPTGSDPQSGLGRHLGVVIGILVAVILLLLLLLLLFLILRHRRQGKHW |
| | TSTQRKADFQHPAGAVGPEPTDRGLQWRSSPAADAQEENLYAAVKHT |
| | QPEDGVEMDTRSPHDEDPQAVTYAEVKHSRPRREMASPPSPLSGEFL |
| | DTKDRQAEEDRQMDTEAAASEAPQDVTYAQLHSLTLRREATEPPPSQE |
| | GPSPAVPSIYATLAIH |
| | SEQ ID NO: 65 |
| LILRB1 hinge- | YGSQSSKPYLLTHPSDPLELVVSGPSGGPSSPTTGPTSTSGPEDQPLTPT |
| transmembrane- | GSDPQSGLGRHLGVVIGILVAVILLLLLLLLLFLILRHRRQGKHWTSTQRK |
| intracellular domain | ADFQHPAGAVGPEPTDRGLQWRSSPAADAQEENLYAAVKHTQPEDG |
| | VEMDTRSPHDEDPQAVTYAEVKHSRPRREMASPPSPLSGEFLDTKDRQ |
| | AEEDRQMDTEAAASEAPQDVTYAQLHSLTLRREATEPPPSQEGPSPAV |
| | PSIYATLAIH |
| | SEQ ID NO: 82 |
| LILRB1 hinge- | VVSGPSGGPSSPTTGPTSTSGPEDQPLTPTGSDPQSGLGRHLGVVIGILV |
| transmembrane- | AVILLLLLLLLLFLILRHRRQGKHWTSTQRKADFQHPAGAVGPEPTDRGL |
| intracellular domain | QWRSSPAADAQEENLYAAVKHTQPEDGVEMDTRSPHDEDPQAVTYA |
| (w/o | EVKHSRPRREMASPPSPLSGEFLDTKDRQAEEDRQMDTEAAASEAPQ |
| YGSQSSKPYLLTHPSDPLEL) | DVTYAQLHSLTLRREATEPPPSQEGPSPAVPSIYATLAIH |
| | SEQ ID NO: 83 |
| LILRB1 hinge domain | YGSQSSKPYLLTHPSDPLELVVSGPSGGPSSPTTGPTSTSGPEDQPLTPT |
| | GSDPQSGLGRHLG |
| | SEQ ID NO: 84 |
| LILRB1 transmembrane | VVIGILVAVILLLLLLLLLFLIL |
| domain | SEQ ID NO: 85 |
| LILRB1 intracellular | RHRRQGKHWTSTQRKADFQHPAGAVGPEPTDRGLQWRSSPAADAQ |
| domain | EENLYAAVKHTQPEDGVEMDTRSPHDEDPQAVTYAEVKHSRPRREMA |
| | SPPSPLSGEFLDTKDRQAEEDRQMDTEAAASEAPQDVTYAQLHSLTLRR |
| | EATEPPPSQEGPSPAVPSIYATLAIH |
| | SEQ ID NO: 81 |
| ITIM1 | NLYAAV |
| | SEQ ID NO: 67 |
| ITIM2 | VTYAEV |
| | SEQ ID NO: 68 |
| ITIM3 | VTYAQL |
| | SEQ ID NO: 69 |
| ITIM4 | SIYATL |
| | SEQ ID NO: 70 |
| ITIM1-2 | NLYAAVKHTQPEDGVEMDTRSPHDEDPQAVTYAEV |
| | SEQ ID NO: 71 |
| ITIM2-3 | VTYAEVKHSRPRREMASPPSPLSGEFLDTKDRQAEEDRQMDTEAAASE |
| | APQDVTYAQL |
| | SEQ ID NO: 72 |
| ITIM3-4 | VTYAQLHSLTLRREATEPPPSQEGPSPAVPSIYATL |
| | SEQ ID NO: 73 |
| ITIM1-3 | NLYAAVKHTQPEDGVEMDTRSPHDEDPQAVTYAEVKHSRPRREMAS |
| | PPSPLSGEFLDTKDRQAEEDRQMDTEAAASEAPQDVTYAQL |
| | SEQ ID NO: 74 |
| ITIM2-4 | VTYAEVKHSRPRREMASPPSPLSGEFLDTKDRQAEEDRQMDTEAAASE |
| | APQDVTYAQLHSLTLRREATEPPPSQEGPSPAVPSIYATL |
| | SEQ ID NO: 75 |
| ITIM1-4 | NLYAAVKHTQPEDGVEMDTRSPHDEDPQAVTYAEVKHSRPRREMAS |
| | PPSPLSGEFLDTKDRQAEEDRQMDTEAAASEAPQDVTYAQLHSLTLRR |
| | EATEPPPSQEGPSPAVPSIYATL |
| | SEQ ID NO: 76 |
| D3D4 domain | YGSQSSKPYLLTHPSDPLEL |
| | SEQ ID NO: 77 |
| Short hinge | VVSGPSGGPSSPTTGPTSTSGPEDQPLTPTGSDPQSGLGRHLG |
| | SEQ ID NO: 78 |
| Hinge (iTIM hinge) | YGSQSSKPYLLTHPSDPLELVVSGPSGGPSSPTTGPTSTSGPEDQPLTPT |
| | GSDPQSGLGRHLGV (SEQ ID NO: 5023) |
| Short hinge 2 | VVSGPSGGPSSPTTGPTSTSGPEDQPLTPTGSDPQSGLGRHLGV |
| | (SEQ ID NO: 5024) |
| Long hinge 1 | AGSGGSGGSGGSPVPSTPPTPSPSTPPTPSPSGGSGNSSGSGGSPVPST |
| | PPTPSPSTPPTPSPSASV (SEQ ID NO: 5025) |
| Long hinge 2 | AGSGGSGGSGGSPVPSTPPTNSSSTPPTPSPSPVPSTPPTNSSSTPPTPS |
| | PSPVPSTPPTNSSSTPPTPSPSASV (SEQ ID NO: 5026) |
| 2x Short hinge | VVSGPSGGPSSPTTGPTSTSGPEDQPLTPTGSDPQSGLGRHVVSGPSG |
| | GPSSPTTGPTSTSGPEDQPLTPTGSDPQSGLGRHLGV |
| | (SEQ ID NO: 5027) |
| Hinge (truncated) | TTGPTSTSGPEDQPLTPTGSDPQSGLGRHLGV (SEQ ID NO: 5028) |
| Hinge-transmembrane | YGSQSSKPYLLTHPSDPLELVVSGPSGGPSSPTTGPTSTSGPEDQPLTPT |
| | GSDPQSGLGRHLGVVIGILVAVILLLLLLLLLFLIL |
| | SEQ ID NO: 79 |
| Transmembrane- | VVIGILVAVILLLLLLLLLFLILRHRRQGKHWTSTQRKADFQHPAGAVGP |
| intracellular domain. | EPTDRGLQWRSSPAADAQEENLYAAVKHTQPEDGVEMDTRSPHDED |
| | PQAVTYAEVKHSRPRREMASPPSPLSGEFLDTKDRQAEEDRQMDTEAA |
| | ASEAPQDVTYAQLHSLTLRREATEPPPSQEGPSPAVPSIYATLAIH |
| | SEQ ID NO:80 |

### Linkers

[0453] In some embodiments, the engineered receptors comprise a linker linking two domains of the engineered receptor. Provided herein are linkers that, in some embodiments, can be used to link domains of the engineered receptors described herein.

[0454] The terms “linker” and “flexible polypeptide linker” as used in the context of linking protein domains, for example intracellular domains or domains within an scFv, refers to a peptide linker that consists of amino acids such as glycine and/or serine residues used alone or in combination, to link two domains together.

[0455] Any linker may be used and many fusion protein linker formats are known. For example, the linker may be flexible or rigid. Non-limiting examples of rigid and flexible linkers are provided in Chen et al. (Adv Drug Deliv Rev. 2013; 65(10):1357-1369).

[0456] The antigen-binding domains described herein may be linked to each other in a random or specified order.

[0457] The antigen-binding domains described herein may be linked to each other in any orientation of N to C terminus.

[0458] Optionally, a short oligo- or polypeptide linker, for example, between 2 and 40 amino acids (e.g., 2, 3, 4, 5, 6, 7, 8, 9, or 10 amino acids) in length may form the linkage between the domains.

[0459] In some embodiments, the linker is a peptide of 1, 2, 3, 4, 5, 6, 7, 8, 9, 10, 11, 12, 13, 14, 15, 16, 17, 18, 19, 20, 21, 22, 23, 24, 25, 26, 27, 28, 29, 30 or more than 30 amino acid residues. Non-limiting examples of amino acids found in linkers include Gly, Ser, Glu, Gin, Ala, Leu, Iso, Lys, Arg, Pro, and the like. In some embodiments, the linker is [(Gly)n1Ser]n2, where n1 and n2 may be any number (e.g. n1 and n2 may independently be 1, 2, 4, 5, 6, 7, 8, 9,10 or more than 10). In some embodiments, n1 is 4.

[0460] In some embodiments, the flexible polypeptide linker is a Gly/Ser linker and comprises the amino acid sequence (Gly-Gly-Ser), (Gly-Gly-Gly-Ser, SEQ ID NO: 231), or (Gly-Gly-Gly-Gly-Ser, SEQ ID NO: 226) which can be repeated n times, where n is a positive integer equal to or greater than 1. For example, n=1, n=2, n=3, n=4, n=5, n=6, n=7, n=8, n=9 and n=10. In some embodiments, the flexible polypeptide linkers include, but are not limited to, GGS, GGGGS (SEQ ID NO: 226), GGGGS GGGGS (SEQ ID NO: 227), GGGGS GGGGS GGGGS (SEQ ID NO: 228), GGGGS GGGGS GGGGS GG (SEQ ID NO: 229) or GGGGS GGGGS GGGGS GGGGS (SEQ ID NO: 230).

[0461] In some embodiments, the linkers include multiple repeats of (Gly Gly Ser), (Gly Ser) or (Gly Gly Gly Ser (SEQ ID NO: 231)). Also included within the scope of the invention are linkers described in WO2012/138475 (incorporated herein by reference).

[0462] In some embodiments, the linker sequence comprises a long linker (LL) sequence. In some embodiments, the long linker sequence comprises GGGGS (SEQ ID NO: 226), repeated four times. In some embodiments, a GGGGS GGGGS GGGGS GGGGS (SEQ ID NO: 230) is used to link intracellular domains in a TCR alpha fusion protein of the disclosure.

[0463] In some embodiments, the long linker sequence comprises GGGGS (SEQ ID NO: 226), repeated three times. In some embodiments, a GGGGS GGGGS GGGGS (SEQ ID NO: 228) is used to link intracellular domains in a TCR beta fusion protein of the disclosure.

[0464] In some embodiments, the linker sequence comprises a short linker (SL) sequence. In some embodiments, the short linker sequence comprises GGGGS (SEQ ID NO: 226).

[0465] In some embodiments, a glycine-serine doublet can be used as a suitable linker.

[0466] In some embodiments, domains are fused directly to each other via peptide bonds without use of a linker.

### Assays

[0467] Provided herein are assays that can be used to measure the activity of the engineered receptors of the disclosure.

[0468] The activity of engineered receptors can be assayed using a cell line engineered to express a reporter of receptor activity such as a luciferase reporter. Exemplary cell lines include Jurkat T cells, although any suitable cell line known in the art may be used. For example, Jurkat cells expressing a luciferase reporter under the control of an NFAT promoter can be used as effector cells. Expression of luciferase by this cell line reflects TCR-mediated signaling.

[0469] The reporter cells can be transfected with each of the various fusion protein constructs, combinations of fusion protein constructs or controls described herein.

[0470] Expression of the fusion proteins in reporter cells can be confirmed by using fluorescently labeled MHC tetramers, for example Alexa Fluor 647-labeled NY-ESO-1-MHC tetramer, to detect expression of the fusion protein.

[0471] To assay the activity of engineered receptors, target cells are loaded with antigen prior to exposure to the effector cells comprising the reporter and the engineered receptor. For example, target cells can be loaded with antigen at least 12, 14, 16, 18, 20, 22 or 24 hours prior to exposure to effector cells. Exemplary target cells include A375 cells, although any suitable cells known in the art may be used. In some cases, target cells can be loaded with serially diluted concentrations of an antigen, such as NY-ESO-1 peptide. The effector cells can then be co-cultured with target cells for a suitable period of time, for example 6 hours. Luciferase is then measured by luminescence reading after co-culture. Luciferase luminescence can be normalized to maximum and minimum intensity to allow comparison of activating peptide concentrations for each engineered receptor construct.

[0472] Provided herein are methods of determining the relative EC50 of engineered receptors of the disclosure. As used herein, “EC50” refers to the concentration of an inhibitor or agent where the response (or binding) is reduced by half. EC50s of engineered receptors of the disclosure refer to concentration of antigen where binding of the engineered receptor to the antigen is reduced by half. Binding of the antigen, or probe to the engineered receptor can be measured by staining with labeled peptide or labeled peptide-MHC complex, for example MHC:NY-ESO-1 pMHC complex conjugated with fluorophore. EC50 can be obtained by nonlinear regression curve fitting of reporter signal with peptide titration. Probe binding and EC50 can be normalized to the levels of benchmark TCR without a fusion protein, e.g. NY-ESO-1 (clone 1G4).

### Polynucleotides

[0473] The disclosure provides polynucleotides encoding the sequence(s) of the engineered receptors described herein.

[0474] In some embodiments, the sequence of the first and/or second fusion protein is operably linked to a promoter. In some embodiments, the sequence encoding the first fusion protein is operably linked to a first promoter, and the sequence encoding a second fusion protein is operably linked to a second promoter.

[0475] The disclosure provides polynucleotides encoding the sequence(s) of the activator and inhibitory receptors described herein.

[0476] In some embodiments, the sequence of the first and/or second receptor, or a fusion protein of the first and/or second receptor is operably linked to a promoter. In some embodiments, the sequence encoding the activator receptor, or a polypeptide thereof, is operably linked to a first promoter, and the sequence encoding a inhibitory receptor, or a fusion protein thereof, is operably linked to a second promoter.

[0477] The disclosure provides polynucleotides comprising the sequence(s) of the interfering RNA described herein. In some embodiments, the polynucleotides comprise the shRNA described herein. In some embodiments, the shRNA comprises a first sequence, having from 5′ end to 3′ end a sequence complementary to the B2M mRNA; and a second sequence, having from 5′ end to 3′ end a sequence complementary to the first sequence. In some embodiments, the B2M mRNA sequence comprises a coding sequence. In some embodiments, the B2M mRNA sequence comprises an untranslated region. In some embodiments, the first and second sequence are present on a polynucleotide, wherein the first sequence and the second sequence are separated by 4, 5, 6, 7, 8, 9, 10, 11, 12, 13, 14, or 15 nucleotides, wherein the 4, 5, 6, 7, 8, 9, 10, 11, 12, 13, 14, or 15 nucleotides form a loop region in the shRNA. In some embodiments, the shRNA further comprises a 5′ flank sequence and a 3′ flank sequence, wherein the 5′ flank sequence is joined to the 5′ end of the first sequence, and wherein the 3′ flank sequence is joined to the 3′ end of the second sequence.

[0478] In some embodiments, the polynucleotide encoding an shRNA has from 5′ end to 3′ end, a 5′ flank sequence, a first sequence, a loop sequence, a second sequence, a 3′ flank sequence. In some embodiments, the polynucleotide encodes, from 5′ end to 3′ end, and a 3′ flank sequence. In some embodiments, the polynucleotide encoding an shRNA has from 5′ end to 3′ end, a 5′ flank sequence, a second sequence, a loop sequence, a first sequence, and a 3′ flank sequence.

[0479] In some embodiments, the first sequences is 18, 19, 20, 21, or 22 nucleotides. In some embodiments, the first sequence is complementary to a sequence selected from SEQ ID NOs: 400-5019. In some embodiments, the first sequence has GC content greater than or equal to 25% and less than 60%. In some embodiments, the first sequence is complementary to a sequence selected from SEQ ID NOs: 400-3995. In some embodiments, the first sequence does not comprise four nucleotides of the same base or a run of seven C or G nucleotide bases. In some embodiments, the first sequence is complementary to a sequence selected from SEQ ID NOs: 400-3399. In some embodiments, the first sequence is 21 nucleotides. In some embodiments, the first sequence is complementary to a sequence selected from SEQ ID NOs: 400-981. In some embodiments, the first sequence is complementary to a sequence selected from SEQ ID NOs: 400-681. In some embodiments, the first sequence is complementary to a sequence selected from SEQ ID NOs: 400-537. Illustrative target B2M sequences complementary to the first sequence are shown in Table 2.

[0480] In some embodiments, the polynucleotide encoding an shRNA further comprises a promoter sequence and a terminator sequence. In some embodiments, the shRNA is operably linked to the promoter. In some embodiments, the polynucleotide has from 5′ end to 3′ end, a promoter sequence, a 5′ flank sequence, a first sequence, a loop sequence, a second sequence, a 3′ flank sequence, and a terminator. In some embodiments, the polynucleotide encodes, from 5′ end to 3′ end, a promoter sequence, a 5′ flank sequence, a second sequence, a loop sequence, a first sequence, a 3′ flank sequence, and a terminator sequence.

[0481] In some embodiments, the polynucleotides comprise a promoter operably linked to the shRNA, such as a mammalian, viral or synthetic promoter. In some embodiments, the promoter sequence is a U6 promoter sequence. In some embodiments, the promoter sequence shares at least 80%, at least 85%, at least 90%, at least 95%, at least 98%, at least 99% identity to SEQ ID NO: 5051. In some embodiments, the promoter sequence is SEQ ID NO: 5051. In some embodiments, the promoter sequence is a H1 promoter sequence. In some embodiments, the promoter sequence shares at least 80%, at least 85%, at least 90%, at least 95%, at least 98%, at least 99% identity to SEQ ID NO: 5052. In some embodiments, the promoter sequence is SEQ ID NO: 5052. In some embodiments, the promoter sequence is a 7SK promoter sequence. In some embodiments, the promoter sequence shares at least 80%, at least 85%, at least 90%, at least 95%, at least 98%, at least 99% identity to SEQ ID NO: 5053. In some embodiments, the promoter sequence is SEQ ID NO: 5053. In some embodiments, the promoter sequence is a Ef1a promoter sequence. In some embodiments, the promoter sequence shares at least 80%, at least 85%, at least 90%, at least 95%, at least 98%, at least 99% identity to SEQ ID NO: 5054. In some embodiments, the promoter sequence is SEQ ID NO: 5054. Illustrative promoter sequences are shown in Table 14.

TABLE 14
Illustrative promoter sequences

| | SEQ | |
|---|---|---|
| Promoter | ID NO | Promoter Sequence |
| U6 Promoter | 5051 | GAGGGCCTATTTCCCATGATTCCTTCATATTTGCATATACGATACAAGGC |
| | | TGTTAGAGAGATAATTGGAATTAATTTGACTGTAAACACAAAGATATTA |
| | | GTACAAAATACGTGACGTAGAAAGTAATAATTTCTTGGGTAGTTTGCAGT |
| | | TTTAAAATTATGTTTTAAAATGGACTATCATATGCTTACCGTAACTTGAA |
| | | AGTATTTCGATTTCTTGGCTTTATATATCTTGTGGAAAGGACGAAACACC |
| H1 Promoter | 5052 | GGAATTCGAACGCTGACGTCATCAACCCGCTCCAAGGAATCGCGGGCC |
| | | CAGTGTCACTAGGCGGGAACACCCAGCGCGCGTGCGCCCTGGCAGGAA |
| | | GATGGCTGTGAGGGACAGGGGAGTGGCGCCCTGCAATATTTGCATGTC |
| | | GCTATGTGTTCTGGGAAATCACCATAAACGTGAAATGTCTTTGGATTTG |
| | | GGAATCTTATAAGTTCTGTATGAGACCACTCTTTCCC |
| 7SK Promoter | 5053 | CTGCAGTATTTAGCATGCCCCACCCATCTGCAAGGCATTCTGGATAGTGT |
| | | CAAAACAGCCGGAAATCAAGTCCGTTTATCTCAAACTTTAGCATTTTGG |
| | | GAATAAATGATATTTGCTATGCTGGTTAAATTAGATTTTAGTTAAATTTC |
| | | CTGCTGAAGCTCTAGTACGATAAGTAACTTGACCTAAGTGTAAAGTTGA |
| | | GATTTCCTTCAGGTTTATATAGCTTGTGCGCCGCCTGGGTACCTC |
| Ef1a Promoter | 5054 | GAGTAATTCATACAAAAGGACTCGCCCCTGCCTTGGGGAATCCCAGGG |
| | | ACCGTCGTTAAACTCCCACTAACGTAGAACCCAGAGATCGCTGCGTTCC |
| | | CGCCCCCTCACCCGCCCGCTCTCGTCATCACTGAGGTGGAGAAGAGCAT |
| | | GCGTGAGGCTCCGGTGCCCGTCAGTGGGCAGAGCGCACATCGCCCACA |
| | | GTCCCCGAGAAGTTGGGGGGAGGGGTCGGCAATTGAACCGGTGCCTA |
| | | GAGAAGGTGGCGCGGGGTAAACTGGGAAAGTGATGTCGTGTACTGGC |
| | | TCCGCCTTTTTCCCGAGGGTGGGGGAGAACCGTATATAAGTGCAGTAGT |
| | | CGCCGTGAACGTTCTTTTTCGCAACGGGTTTGCCGCCAGAACACAGGTA |
| | | AGTGCCGTGTGTGGTTCCCGCGGGCCTGGCCTCTTTACGGGTTATGGCC |
| | | CTTGCGTGCCTTGAATTACTTCCACGCCCCTGGCTGCAGTACGTGATTCT |
| | | TGATCCCGAGCTTCGGGTTGGAAGTGGGTGGGAGAGTTCGAGGCCTTG |
| | | CGCTTAAGGAGCCCCTTCGCCTCGTGCTTGAGTTGAGGCCTGGCTTGGG |
| | | CGCTGGGGCCGCCGCGTGCGAATCTGGTGGCACCTTCGCGCCTGTCTCG |
| | | CTGCTTTCGATAAGTCTCTAGCCATTTAAAATTTTTGATGACCTGCTGCG |
| | | ACGCTTTTTTTCTGGCAAGATAGTCTTGTAAATGCGGGCCAAGATCTGC |
| | | ACACTGGTATTTCGGTTTTTGGGGCCGCGGGCGGCGACGGGGCCCGTG |
| | | CGTCCCAGCGCACATGTTCGGCGAGGCGGGGCCTGCGAGCGCGGCCAC |
| | | CGAGAATCGGACGGGGGTAGTCTCAAGCTGGCCGGCCTGCTCTGGTGC |
| | | CTGGCCTCGCGCCGCCGTGTATCGCCCCGCCCTGGGCGGCAAGGCTGG |
| | | CCCGGTCGGCACCAGTTGCGTGAGCGGAAAGATGGCCGCTTCCCGGCC |
| | | CTGCTGCAGGGAGCTCAAAATGGAGGACGCGGCGCTCGGGAGAGCGG |
| | | GCGGGTGAGTCACCCACACAAAGGAAAAGGGCCTTTCCGTCCTCAGCC |
| | | GTCGCTTCATGTGACTCCACGGAGTACCGGGCGCCGTCCAGGCACCTCG |
| | | ATTAGTTCTCGAGCTTTTGGAGTACGTCGTCTTTAGGTTGGGGGGAGGG |
| | | GTTTTATGCGATGGAGTTTCCCCACACTGAGTGGGTGGAGACTGAAGTT |
| | | AGGCCAGCTTGGCACTTGATGTAATTCTCCTTGGAATTTGCCCTTTTTGA |
| | | GTTTGGATCTTGGTTCATTCTCAAGCCTCAGACAGTGGTTCAAAGTTTTT |
| | | TTCTTCCATTTCAGGTGTCGTGA |

### Vectors

[0482] The disclosure provides vectors comprising the polynucleotides described herein.

[0483] The disclosure provides vectors encoding the interfering RNA described herein. In some embodiments, the vectors encode the shRNA described herein. In some embodiments, the shRNA comprises a first sequence, having from 5′ end to 3′ end a sequence complementary to the B2M mRNA; and a second sequence, having from 5′ end to 3′ end a sequence complementary to the first sequence. In some embodiments, the first and second sequence are present on a polynucleotide, wherein the first sequence and the second sequence are separated by 4, 5, 6, 7, 8, 9, 10, 11, 12, 13, 14, or 15 nucleotides, wherein the 4, 5, 6, 7, 8, 9, 10, 11, 12, 13, 14, or 15 nucleotides form a loop region in the shRNA. In some embodiments, the shRNA further comprises a 5′ flank sequence and a 3′ flank sequence, wherein the 5′ flank sequence is joined to the 5′ end of the first sequence, and wherein the 3′ flank sequence is joined to the 3′ end of the second sequence.

[0484] In some embodiments, the vectors encoding an shRNA has from 5′ end to 3′ end, a 5′ flank sequence, a first sequence, a loop sequence, a second sequence, a 3′ flank sequence. In some embodiments, the vectors encode, from 5′ end to 3′ end, and a 3′ flank sequence. In some embodiments, the vectors encode an shRNA has from 5′ end to 3′ end, a 5′ flank sequence, a second sequence, a loop sequence, a first sequence, and a 3′ flank sequence.

[0485] In some embodiments, the vectors encoding an shRNA further comprise a promoter sequence and a terminator sequence. In some embodiments, the shRNA is operably linked to the promoter. In some embodiments, the vector has from 5′ end to 3′ end, a promoter sequence, a 5′ flank sequence, a first sequence, a loop sequence, a second sequence, a 3′ flank sequence, and a terminator. In some embodiments, the polynucleotide encodes, from 5′ end to 3′ end, a promoter sequence, a 5′ flank sequence, a second sequence, a loop sequence, a first sequence, a 3′ flank sequence, and a terminator sequence.

[0486] In some embodiments of the vectors of the disclosure, the promoter sequence is a U6 promoter sequence. In some embodiments, the promoter sequence shares at least 80%, at least 85%, at least 90%, at least 95%, at least 98%, at least 99% identity to SEQ ID NO: 5051. In some embodiments, the promoter sequence is SEQ ID NO: 5051. In some embodiments, the promoter sequence is a H1 promoter sequence. In some embodiments, the promoter sequence shares at least 80%, at least 85%, at least 90%, at least 95%, at least 98%, at least 99% identity to SEQ ID NO: 5052. In some embodiments, the promoter sequence is SEQ ID NO: 5052. In some embodiments, the promoter sequence is a 7SK promoter sequence. In some embodiments, the promoter sequence shares at least 80%, at least 85%, at least 90%, at least 95%, at least 98%, at least 99% identity to SEQ ID NO: 5053. In some embodiments, the promoter sequence is SEQ ID NO: 5053. In some embodiments, the promoter sequence is a Ef1a promoter sequence. In some embodiments, the promoter sequence shares at least 80%, at least 85%, at least 90%, at least 95%, at least 98%, at least 99% identity to SEQ ID NO: 5054. In some embodiments, the promoter sequence is SEQ ID NO: 5054. Illustrative promoter sequences are shown in Table 14.

[0487] In some embodiments, the vector described herein is a viral vector. In some embodiments, the vector is a lentiviral vector.

[0488] The disclosure provides vectors encoding an interfering RNA described herein and an inhibitory receptor. In some embodiments, the vector comprises an shRNA described herein and a polynucleotide encoding an inhibitor receptor comprising a ligand binding domain specific to a class I major histocompatibility complex (WIC-I) molecule, or a peptide-WIC complex thereof.

[0489] The disclosure provides polynucleotides encoding the sequence(s) of the activator and inhibitory receptors described herein.

[0490] In some embodiments, the sequence of the first and/or second receptor, or a fusion protein of the first and/or second receptor is operably linked to a promoter. In some embodiments, the sequence encoding the activator receptor, or a polypeptide thereof, is operably linked to a first promoter, and the sequence encoding a inhibitory receptor, or a fusion protein thereof, is operably linked to a second promoter.

[0491] The disclosure provides vectors comprising the polynucleotides described herein.

[0492] The disclosure provides vectors encoding the coding sequence or sequences of any of the receptors described herein. In some embodiments, the sequence of the first and/or second fusion protein is operably linked to a promoter. In some embodiments, the sequence encoding the first fusion protein is operably linked to a first promoter, and the sequence encoding a second fusion protein is operably linked to a second promoter.

[0493] In some embodiments, the first engineered receptor is encoded by a first vector and the second engineered receptor is encoded by second vector. In some embodiments, both engineered receptors are encoded by a single vector.

[0494] In some embodiments, the first and second receptors are encoded by a single vector. Methods of encoding multiple polypeptides using a single vector will be known to persons of ordinary skill in the art, and include, inter alia, encoding multiple polypeptides under control of different promoters, or, if a single promoter is used to control transcription of multiple polypeptides, use of sequences encoding internal ribosome entry sites (IRES) and/or self-cleaving peptides. Exemplary self-cleaving peptides include T2A, P2A, E2A and F2A self-cleaving peptides. In some embodiments, the T2A self-cleaving peptide comprises a sequence of EGRGSLLTCGDVEENPGP (SEQ ID NO: 271). In some embodiments, the P2A self-cleaving peptide comprises a sequence of ATNFSLLKQAGDVEENPGP (SEQ ID NO: 192). In some embodiments, the E2A self-cleaving peptide comprises a sequence of QCTNYALLKLAGDVESNPGP (SEQ ID NO: 272). In some embodiments, the F2A self-cleaving peptide comprises a sequence of VKQTLNFDLLKLAGDVESNPGP (SEQ ID NO: 273). In some embodiments, the P2A self-cleaving peptide comprises a sequence of VKQTLNFDLLKLAGDVESNPGP (SEQ ID NO: 5476).

[0495] The disclosure provides polynucleotides encoding the gene editing systems described herein.

[0496] In some embodiments, the vector is an expression vector, i.e. for the expression of the fusion protein in a suitable cell.

[0497] Vectors derived from retroviruses such as the lentivirus are suitable tools to achieve long-term gene transfer since they allow long-term, stable integration of a transgene and its propagation in daughter cells. Lentiviral vectors have the added advantage over vectors derived from onco-retroviruses such as murine leukemia viruses in that they can transduce non-proliferating cells, such as hepatocytes. They also have the added advantage of low immunogenicity.

[0498] The expression of natural or synthetic nucleic acids encoding fusion proteins is typically achieved by operably linking a nucleic acid encoding the fusion protein or portions thereof to a promoter, and incorporating the construct into an expression vector. The vectors can be suitable for replication and integration eukaryotes. Typical cloning vectors contain transcription and translation terminators, initiation sequences, and promoters useful for regulation of the expression of the desired nucleic acid sequence.

[0499] The polynucleotides encoding the fusion proteins can be cloned into a number of types of vectors. For example, the polynucleotides can be cloned into a vector including, but not limited to a plasmid, a phagemid, a phage derivative, an animal virus, and a cosmid. Vectors of particular interest include expression vectors, replication vectors, probe generation vectors, and sequencing vectors.

[0500] Further, the expression vector may be provided to cells, such as immune cells, in the form of a viral vector. Viral vector technology is well known in the art and is described, for example, in Sambrook et al. (2001, Molecular Cloning: A Laboratory Manual, Cold Spring Harbor Laboratory, New York), and in other virology and molecular biology manuals. Viruses, which are useful as vectors include, but are not limited to, retroviruses, adenoviruses, adeno-associated viruses, herpes viruses, and lentiviruses. In general, a suitable vector contains an origin of replication functional in at least one organism, a promoter sequence, convenient restriction endonuclease sites, and one or more selectable markers, (e.g., WO 01/96584; WO 01/29058; and U.S. Pat. No. 6,326,193).

[0501] A number of viral based systems have been developed for gene transfer into mammalian cells. For example, retroviruses provide a convenient platform for gene delivery systems. A selected gene can be inserted into a vector and packaged in retroviral particles using techniques known in the art. The recombinant virus can then be isolated and delivered to cells of the subject either in vivo or ex vivo. A number of retroviral systems are known in the art. In some embodiments, adenovirus vectors are used. A number of adenovirus vectors are known in the art. In one embodiment, lentivirus vectors are used.

[0502] Additional promoter elements, e.g., enhancers, regulate the frequency of transcriptional initiation. Typically, these are located in the region 30-110 basepairs (bp) upstream of the start site, although a number of promoters have recently been shown to contain functional elements downstream of the start site as well. The spacing between promoter elements frequently is flexible, so that promoter function is preserved when elements are inverted or moved relative to one another. In the thymidine kinase (tk) promoter, the spacing between promoter elements can be increased to 50 bp apart before activity begins to decline. Depending on the promoter, it appears that individual elements can function either cooperatively or independently to activate transcription.

[0503] One example of a suitable promoter is the immediate early cytomegalovirus (CMV) promoter sequence. This promoter sequence is a strong constitutive promoter sequence capable of driving high levels of expression of any polynucleotide sequence operatively linked thereto. Another example of a suitable promoter is Elongation Growth Factor-1α(EF-1α). However, other constitutive promoter sequences may also be used, including, but not limited to the simian virus 40 (SV40) early promoter, mouse mammary tumor virus (MMTV), human immunodeficiency virus (HIV) long terminal repeat (LTR) promoter, MoMuLV promoter, an avian leukemia virus promoter, an Epstein-Barr virus immediate early promoter, a Rous sarcoma virus promoter, as well as human gene promoters such as, but not limited to, the actin promoter, the myosin promoter, the hemoglobin promoter, and the creatine kinase promoter. Further, the invention should not be limited to the use of constitutive promoters. Inducible promoters are also contemplated as part of the invention. The use of an inducible promoter provides a molecular switch capable of turning on expression of the polynucleotide sequence which it is operatively linked when such expression is desired, or turning off the expression when expression is not desired. Examples of inducible promoters include, but are not limited to a metallothionine promoter, a glucocorticoid promoter, a progesterone promoter, and a tetracycline promoter.

[0504] In order to assess the expression of a fusion protein, the expression vector to be introduced into a cell can also contain either a selectable marker gene or a reporter gene or both to facilitate identification and selection of expressing cells from the population of cells sought to be transfected or infected through viral vectors. In other aspects, the selectable marker may be carried on a separate piece of DNA and used in a co-transfection procedure. Both selectable markers and reporter genes may be flanked with appropriate regulatory sequences to enable expression in the host cells. Useful selectable markers include, for example, antibiotic-resistance genes, such as neo and the like.

[0505] Reporter genes are used for identifying potentially transfected or transduced cells and for evaluating the functionality of regulatory sequences. In general, a reporter gene is a gene that is not present in or expressed by the recipient organism or tissue and that encodes a polypeptide whose expression is manifested by some easily detectable property, e.g., enzymatic activity. Expression of the reporter gene is assayed at a suitable time after the DNA has been introduced into the recipient cells. Suitable reporter genes may include genes encoding luciferase, beta-galactosidase, chloramphenicol acetyl transferase, secreted alkaline phosphatase, or the green fluorescent protein gene (e.g., Ui-Tei et al., 2000 FEBS Letters 479: 79-82). Suitable expression systems are well known and may be prepared using known techniques or obtained commercially. In general, the construct with the minimal 5′ flanking region showing the highest level of expression of reporter gene is identified as the promoter. Such promoter regions may be linked to a reporter gene and used to evaluate agents for the ability to modulate promoter-driven transcription.

[0506] Methods of introducing and expressing genes into a cell are known in the art. In the context of an expression vector, the vector can be readily introduced into a host cell, e.g., mammalian, bacterial, yeast, or insect cell by any method in the art. For example, the expression vector can be transferred into a host cell by physical, chemical, or biological means.

[0507] Physical methods for introducing a polynucleotide into a host cell include calcium phosphate precipitation, lipofection, particle bombardment, microinjection, electroporation, and the like. Methods for producing cells comprising vectors and/or exogenous nucleic acids are well-known in the art. See, for example, Sambrook et al. (2001, Molecular Cloning: A Laboratory Manual, Cold Spring Harbor Laboratory, New York). One method for the introduction of a polynucleotide into a host cell is calcium phosphate transfection.

[0508] Biological methods for introducing a polynucleotide of interest into a host cell include the use of DNA and RNA vectors. Viral vectors, and especially retroviral vectors, have become the most widely used method for inserting genes into mammalian, e.g., human cells. Other viral vectors can be derived from lentivirus, poxviruses, herpes simplex virus I, adenoviruses and adeno-associated viruses, and the like. See, for example, U.S. Pat. Nos. 5,350,674 and 5,585,362.

[0509] Chemical means for introducing a polynucleotide into a host cell include colloidal dispersion systems, such as macromolecule complexes, nanocapsules, microspheres, beads, and lipid-based systems including oil-in-water emulsions, micelles, mixed micelles, and liposomes. An exemplary colloidal system for use as a delivery vehicle in vitro and in vivo is a liposome (e.g., an artificial membrane vesicle).

[0510] Regardless of the method used to introduce exogenous nucleic acids into a host cell or otherwise expose a cell to the inhibitor of the present invention, in order to confirm the presence of the recombinant DNA sequence in the host cell, a variety of assays may be performed. Such assays include, for example, “molecular biological” assays well known to those of skill in the art, such as Southern and Northern blotting, RT-PCR and PCR; “biochemical” assays, such as detecting the presence or absence of a particular peptide, e.g., by immunological means (ELISAs and Western blots) or by assays described herein to identify agents falling within the scope of the invention.

### Immune Cells

[0511] Provided herein are immune cells comprising the polynucleotides, vectors, fusion proteins and engineered receptors described herein.

[0512] Provided herein are immune cells edited using the gene editing systems described herein.

[0513] In some embodiments, the immune cells comprise the polynucleotides, vectors, fusion proteins or engineered receptors of the disclosure.

[0514] Provided herein are immune cells comprising the interfering RNAs, polynucleotides, vectors, fusion proteins and engineered receptors described herein.

[0515] Provided herein are immune cells comprising the interfering RNAs, e.g. shRNAS, described herein. In some embodiments, the immune cells comprise the interfering RNAs. polynucleotides, vectors, fusion proteins or engineered receptors of the disclosure.

[0516] In some embodiments, the immune cell is a T cell, B cell, or Natural Killer (NK) cell. In some embodiments, the immune cell is autologous to a subject. In some embodiments, the immune cell is allogeneic to a subject. In some embodiments, the immune cell is non-natural.

[0517] In some embodiments, the immune cell is isolated. In some embodiments, the immune cell is for use as a medicament. In some embodiments, the medicament is for the treatment of cancer in a subject in need thereof.

[0518] In some embodiments, the immune cell comprises an inhibitory receptor comprising a ligand binding domain specific to a class I major histocompatibility complex (WIC-I) molecule, or a peptide-WIC complex thereof; wherein expression and/or function of beta-2-microglobulin (B2M) in said immune cell has been reduced or eliminated. In some embodiments, the immune cell further comprises an interfering RNA, comprising a sequence complementary to a sequence of a B2M mRNA. In some embodiments, the interfering RNA is capable of inducing RNAi-mediated degradation of the B2M mRNA. In some embodiments, the interfering RNA is a short hairpin RNA (shRNA).

[0519] In some embodiments, the shRNA comprises a first sequence, having from 5′ to 3′ end a sequence complementary to the B2M mRNA; and a second sequence, having from 5′ to 3′ end a sequence complementary to the first sequence, wherein the first sequence and second sequence form the shRNA.

[0520] In some embodiments, the first sequences is 18, 19, 20, 21, or 22 nucleotides. In some embodiments, the first sequence is complementary to a sequence selected from SEQ ID NOs: 400-5019. In some embodiments, the first sequence has GC content greater than or equal to 25% and less than 60%. In some embodiments, the first sequence is complementary to a sequence selected from SEQ ID NOs: 400-3995. In some embodiments, the first sequence does not comprise four nucleotides of the same base or a run of seven C or G nucleotide bases. In some embodiments, the first sequence is complementary to a sequence selected from SEQ ID NOs: 400-3399. In some embodiments, the first sequence is 21 nucleotides. In some embodiments, the first sequence is complementary to a sequence selected from SEQ ID NOs: 400-981. In some embodiments, the first sequence is complementary to a sequence selected from SEQ ID NOs: 400-681. In some embodiments, the first sequence is complementary to a sequence selected from SEQ ID NOs: 400-537. Illustrative target B2M sequences complementary to the first sequence are shown in Table 12.

[0521] In some embodiments, the first and second sequence are present on a single stranded polynucleotide, wherein the first sequence and second sequence are separated by 4, 5, 6, 7, 8, 9, 10, 11, 12, 13, 14, or 15 nucleotides, wherein the 4, 5, 6, 7, 8, 9, 10, 11, 12, 13, 14, or 15 nucleotides form a loop region in the shRNA. In some embodiments, the loop region comprises a sequence selected from SEQ ID NOs: 5030-5043. Illustrative loop region sequences are shown in Table 3.

[0522] In some embodiments, the shRNA further comprises a 5′ flank sequence and a 3′ flank sequence, wherein the 5′ flank sequence is joined to the 5′ end of the first sequence, and wherein the 3′ flank sequence is joined to the 3′ end of the second sequence. In some embodiments, the 5′ flank sequence is selected from SEQ ID NO: 5044-5047. In some embodiments, the 3′ flank sequence is selected from SEQ ID NO: 5048-5050. Illustrative flank sequences are shown in Table 4.

[0523] As used herein, the term “immune cell” refers to a cell involved in the innate or adaptive (acquired) immune systems. Exemplary innate immune cells include phagocytic cells such as neutrophils, monocytes and macrophages, Natural Killer (NK) cells, polymophonuclear leukocytes such as neutrophils eosinophils and basophils and mononuclear cells such as monocytes, macrophages and mast cells. Immune cells with roles in acquired immunity include lymphocytes such as T-cells and B-cells.

[0524] As used herein, a “T-cell” refers to a type of lymphocyte that originates from a bone marrow precursor that develops in the thymus gland. There are several distinct types of T-cells which develop upon migration to the thymus, which include, helper CD4+ T-cells, cytotoxic CD8+ T cells, memory T cells, regulatory CD4+ T-cells and stem memory T-cells. Different types of T-cells can be distinguished by the ordinarily skilled artisan based on their expression of markers. Methods of distinguishing between T-cell types will be readily apparent to the ordinarily skilled artisan.

[0525] In some embodiments, the engineered immune cell expresses the first and second receptors at a ratio of about 100:1 to 1:100 of first receptor to second receptor. In some embodiments, the engineered immune cell expresses the first and second receptors at a ratio of about 50:1 to 1:50 of first receptor to second receptor. In some embodiments, the engineered immune cell expresses the first and second receptors at a ratio of about 10:1 to 1:10 of first receptor to second receptor. In some embodiments, the engineered immune cell expresses the first and second receptors at a ratio of about 5:1 to 1:5 of first receptor to second receptor. In some embodiments, the engineered immune cell expresses the first and second receptors at a ratio of about 3:1 to 1:3 of first receptor to second receptor. In some embodiments, the engineered immune cell expresses the first and second receptors at a ratio of about 2:1 to 1:2 of first receptor to second receptor. In some embodiments, the engineered immune cell expresses the first and second receptors at a ratio of about 1:1.

[0526] In some embodiments, the engineered immune cell comprising the engineered receptors of the disclosure is a T cell. In some embodiments, the T cell is an effector T cell or a regulatory T cell.

[0527] Methods transforming populations of immune cells, such as T cells, with the vectors of the instant disclosure will be readily apparent to the person of ordinary skill in the art. For example, CD3+ T cells can be isolated from PBMCs using a CD3+ T cell negative isolation kit (Miltenyi), according to manufacturer's instructions. T cells can be cultured at a density of 1×10^6 cells/mL in X-Vivo 15 media supplemented with 5% human A/B serum and 1% Pen/strep in the presence of CD3/28 Dynabeads (1:1 cell to bead ratio) and 300 Units/mL of IL-2 (Miltenyi). After 2 days, T cells can be transduced with viral vectors, such as lentiviral vectors using methods known in the art. In some embodiments, the viral vector is transduced at a multiplicity of infection (MOI) of 5. Cells can then be cultured in IL-2 or other cytokines such as combinations of IL-7/15/21 for an additional 5 days prior to enrichment. Methods of isolating and culturing other populations of immune cells, such as B cells, or other populations of T cells, will be readily apparent to the person of ordinary skill in the art. Although this method outlines a potential approach it should be noted that these methodologies are rapidly evolving. For example excellent viral transduction of peripheral blood mononuclear cells can be achieved after 5 days of growth to generate a >99% CD3+ highly transduced cell population.

[0528] Methods of activating and culturing populations of T cells comprising the engineered TCRs, CARs, fusion proteins or vectors encoding the fusion proteins of the instant disclosure, will be readily apparent to the person of ordinary skill in the art.

[0529] Whether prior to or after genetic modification of T cells to express an engineered TCR, the T cells can be activated and expanded generally using methods as described, for example, in U.S. Pat. Nos. 6,352,694; 6,534,055; 6,905,680; 6,692,964; 5,858,358; 6,887,466; 6,905,681; 7,144,575; 7,067,318; 7,172,869; 7,232,566; 7,175,843; 5,883,223; 6,905,874; 6,797,514; 6,867,041, 10040846; and U.S. Pat. Appl. Pub. No. 2006/0121005.

[0530] In some embodiments, T cells of the instant disclosure are expanded and activated in vitro. Generally, the T cells of the instant disclosure are expanded in vitro by contact with a surface having attached thereto an agent that stimulates a CD3/TCR complex associated signal and a ligand that stimulates a co-stimulatory molecule on the surface of the T cells. In particular, T cell populations may be stimulated as described herein, such as by contact with an anti-CD3 antibody. For co-stimulation of an accessory molecule on the surface of the T cells, a ligand that binds the accessory molecule is used. For example, a population of T cells can be contacted with an anti-CD3 antibody and an anti-CD28 antibody, under conditions appropriate for stimulating proliferation of the T cells. To stimulate proliferation of either CD4+ T cells or CD8+ T cells, an anti-CD3 antibody and an anti-CD28 antibody can be used. Examples of an anti-CD28 antibody include 9.3, B-T3, XR-CD28 (Diaclone, Besancon, France) can be used as can other methods commonly known in the art (Berg et al., Transplant Proc. 30(8):3975-3977, 1998; Haanen et al., J. Exp. Med. 190(9):13191328, 1999; Garland et al., J. Immunol Meth. 227(1-2):53-63, 1999).

[0531] In some embodiments, the primary stimulatory signal and the co-stimulatory signal for the T cell may be provided by different protocols. For example, the agents providing each signal may be in solution or coupled to a surface. When coupled to a surface, the agents may be coupled to the same surface (i.e., in “cis” formation) or to separate surfaces (i.e., in “trans” formation). Alternatively, one agent may be coupled to a surface and the other agent in solution. In some embodiments, the agent providing the co-stimulatory signal is bound to a cell surface and the agent providing the primary activation signal is in solution or coupled to a surface. In certain embodiments, both agents can be in solution. In another embodiment, the agents may be in soluble form, and then cross-linked to a surface, such as a cell expressing Fc receptors or an antibody or other binding agent which will bind to the agents. In this regard, see for example, U.S. Patent Application Publication Nos. 20040101519 and 20060034810 for artificial antigen presenting cells (aAPCs) that are contemplated for use in activating and expanding T cells in the present invention.

[0532] In some embodiments, the two agents are immobilized on beads, either on the same bead, i.e., “cis,” or to separate beads, i.e., “trans.” By way of example, the agent providing the primary activation signal is an anti-CD3 antibody or an antigen-binding fragment thereof and the agent providing the co-stimulatory signal is an anti-CD28 antibody or antigen-binding fragment thereof; and both agents are co-immobilized to the same bead in equivalent molecular amounts. In one embodiment, a 1:1 ratio of each antibody bound to the beads for CD4+ T cell expansion and T cell growth is used. In some embodiments, the ratio of CD3:CD28 antibody bound to the beads ranges from 100:1 to 1:100 and all integer values there between. In one aspect of the present invention, more anti-CD28 antibody is bound to the particles than anti-CD3 antibody, i.e., the ratio of CD3:CD28 is less than one. In certain embodiments of the invention, the ratio of anti CD28 antibody to anti CD3 antibody bound to the beads is greater than 2:1.

[0533] Ratios of particles to cells from 1:500 to 500:1 and any integer values in between may be used to stimulate T cells or other target cells. As those of ordinary skill in the art can readily appreciate, the ratio of particles to cells may depend on particle size relative to the target cell. For example, small sized beads could only bind a few cells, while larger beads could bind many. In certain embodiments the ratio of cells to particles ranges from 1:100 to 100:1 and any integer values in-between and in further embodiments the ratio comprises 1:9 to 9:1 and any integer values in between, can also be used to stimulate T cells. In some embodiments, a ratio of 1:1 cells to beads is used. One of skill in the art will appreciate that a variety of other ratios may be suitable for use in the present invention. In particular, ratios will vary depending on particle size and on cell size and type.

[0534] In further embodiments of the present invention, the cells, such as T cells, are combined with agent-coated beads, the beads and the cells are subsequently separated, and then the cells are cultured. In an alternative embodiment, prior to culture, the agent-coated beads and cells are not separated but are cultured together. In a further embodiment, the beads and cells are first concentrated by application of a force, such as a magnetic force, resulting in increased ligation of cell surface markers, thereby inducing cell stimulation.

[0535] By way of example, cell surface proteins may be ligated by allowing paramagnetic beads to which anti-CD3 and anti-CD28 are attached to contact the T cells. In one embodiment the cells (for example, CD4+ T cells) and beads (for example, DYNABEADS CD3/CD28 T paramagnetic beads at a ratio of 1:1) are combined in a buffer. Again, those of ordinary skill in the art can readily appreciate any cell concentration may be used. In certain embodiments, it may be desirable to significantly decrease the volume in which particles and cells are mixed together (i.e., increase the concentration of cells), to ensure maximum contact of cells and particles. For example, in one embodiment, a concentration of about 2 billion cells/ml is used. In another embodiment, greater than 100 million cells/ml is used. In a further embodiment, a concentration of cells of 10, 15, 20, 25, 30, 35, 40, 45, or 50 million cells/ml is used. In yet another embodiment, a concentration of cells from 75, 80, 85, 90, 95, or 100 million cells/ml is used. In further embodiments, concentrations of 125 or 150 million cells/ml can be used. In some embodiments, cells that are cultured at a density of 1×10⁶ cells/mL are used.

[0536] In some embodiments, the mixture may be cultured for several hours (about 3 hours) to about 14 days or any hourly integer value in between. In another embodiment, the beads and T cells are cultured together for 2-3 days. Conditions appropriate for T cell culture include an appropriate media (e.g., Minimal Essential Media or RPMI Media 1640 or, X-vivo 15, (Lonza)) that may contain factors necessary for proliferation and viability, including serum (e.g., fetal bovine or human serum), interleukin-2 (IL-2), insulin, IFN-γ, IL-4, IL-7, GM-CSF, IL-10, IL-12, IL-15, TGFβ, and TNF-α or any other additives for the growth of cells known to the skilled artisan. Other additives for the growth of cells include, but are not limited to, surfactant, plasmanate, and reducing agents such as N-acetyl-cysteine and 2-mercaptoethanol. Media can include RPMI 1640, AIM-V, DMEM, MEM, α-MEM, F-12, X-Vivo 15, and X-Vivo 20, Optimizer, with added amino acids, sodium pyruvate, and vitamins, either serum-free or supplemented with an appropriate amount of serum (or plasma) or a defined set of hormones, and/or an amount of cytokine(s) sufficient for the growth and expansion of T cells. In some embodiments, the media comprises X-VIVO-15 media supplemented with 5% human AB serum, 1% penicillin/streptomycin (pen/strep) and 300 Units/ml of IL-2 (Miltenyi).

[0537] The T cells are maintained under conditions necessary to support growth, for example, an appropriate temperature (e.g., 37° C.) and atmosphere (e.g., air plus 5% CO2).

[0538] In some embodiments, the T cells comprising engineered TCRs of the disclosure are autologous. In some embodiments, the T cells comprising engineered receptors of the disclosure are allogeneic. Prior to expansion and genetic modification, a source of T cells is obtained from a subject. Immune cells such as T cells can be obtained from a number of sources, including peripheral blood mononuclear cells, bone marrow, lymph node tissue, cord blood, thymus tissue, tissue from a site of infection, ascites, pleural effusion, spleen tissue, and tumors. In certain embodiments of the present invention, any number of T cell lines available in the art, may be used. In certain embodiments of the present invention, T cells can be obtained from a unit of blood collected from a subject using any number of techniques known to the skilled artisan, such as Ficoll™ separation.

[0539] In some embodiments, cells from the circulating blood of an individual are obtained by apheresis. The apheresis product typically contains lymphocytes, including T cells, monocytes, granulocytes, B cells, other nucleated white blood cells, red blood cells, and platelets. In some embodiments, the cells collected by apheresis may be washed to remove the plasma fraction and to place the cells in an appropriate buffer or media for subsequent processing steps. In some embodiments, the cells are washed with phosphate buffered saline (PBS). In alternative embodiments, the wash solution lacks calcium and may lack magnesium or may lack many if not all divalent cations. As those of ordinary skill in the art would readily appreciate a washing step may be accomplished by methods known to those in the art, such as by using a semi-automated “flow-through” centrifuge (for example, the Cobe 2991 cell processor, the Baxter CytoMate, or the Haemonetics Cell Saver 5) according to the manufacturer's instructions. After washing, the cells may be resuspended in a variety of biocompatible buffers, such as, for example, Ca2+-free, Mg2+-free PBS, PlasmaLyte A, or other saline solution with or without buffer. Alternatively, the undesirable components of the apheresis sample may be removed and the cells directly resuspended in culture media.

[0540] In some embodiments, immune cells such as T cells are isolated from peripheral blood lymphocytes by lysing the red blood cells and depleting the monocytes, for example, by centrifugation through a PERCOLL™ gradient or by counterflow centrifugal elutriation. Specific subpopulations of immune cells, such as T cells, B cells, or CD4+ T cells can be further isolated by positive or negative selection techniques. For example, in one embodiment, T cells are isolated by incubation with anti-CD4 -conjugated beads, for a time period sufficient for positive selection of the desired T cells.

[0541] Enrichment of an immune cell population, such as a T cell population, by negative selection can be accomplished with a combination of antibodies directed to surface markers unique to the negatively selected cells. One method is cell sorting and/or selection via negative magnetic immune-adherence or flow cytometry that uses a cocktail of monoclonal antibodies directed to cell surface markers present on the cells negatively selected. For example, to enrich for CD4+ cells by negative selection, a monoclonal antibody cocktail typically includes antibodies to CD 14, CD20, CD 11b, CD 16, HLA-DR, and CD8.

[0542] In some embodiments, an immune cell population, such as a T cell population, is depleted of NK cells. NK cells can be depleted through any methods known in the art. For example, NK cells can be depleted using antibodies, such as anti-CD56 antibodies, that, when bound to beads, can be used to bind to and isolate CD56 positive NK cells from a mixture of immune cell types. NK cell isolation kits are available commercially, and include, for example, the FastStep NK Cell Isolation kit from Creative Biolabs, the NK Cell Isolation kit from Miltenyi Biotec, and the EasySep Human NK Cell Isolation kit from StemCell Technologies. An exemplary NK cell depletion protocol includes incubating peripheral blood mononuclear cells (PBMCs) with microbeads coated with anti-human CD56 (available from, e.g., Miltenyi Biotec, catalog number #130-050-401, or #170-076-713 if CliniMACS CD56 GMP Microbeads) according to the manufacturer's instructions. Anti-CD56 bound cells are then separated on an AutoMACS Pro, CliniMACS Prodigy (Miltyenyi Biotec), or equivalent. The negative fraction, i.e. the fraction not containing anti-CD56 bound cells, is collected and incubated with microbeads suitable to isolate T cells. Suitable microbeads for T cells isolation include anti-human CD4 and CD8 microbeads (Miltyenyi Biotec# 130-045-101 and 130-045-201 respectively) or CliniMACS CD4 GMP and CD8 MicroBeads (Miltyenyi Biotec# 170-076-702 and 170-076-703). CD4 and/or CD8 positive T cells are then separated on an AutoMACS Pro or CliniMACS prodigy, or equivalent.

[0543] For isolation of a desired population of immune cells by positive or negative selection, the concentration of cells and surface (e.g., particles such as beads) can be varied. In certain embodiments, it may be desirable to significantly decrease the volume in which beads and cells are mixed together (i.e., increase the concentration of cells), to ensure maximum contact of cells and beads.

[0544] In some embodiments, the cells may be incubated on a rotator for varying lengths of time at varying speeds at either 2-10° C. or at room temperature.

[0545] T cells for stimulation, or PBMCs from which immune cells such as T cells are isolated, can also be frozen after a washing step. Wishing not to be bound by theory, the freeze and subsequent thaw step provides a more uniform product by removing granulocytes and to some extent monocytes in the cell population. After the washing step that removes plasma and platelets, the cells may be suspended in a freezing solution. While many freezing solutions and parameters are known in the art and will be useful in this context, one method involves using PBS containing 20% DMSO and 8% human serum albumin, or culture media containing 10% Dextran 40 and 5% Dextrose, 20% Human Serum Albumin and 7.5% DMSO, or 31.25% Plasmalyte-A, 31.25% Dextrose 5%, 0.45% NaCl, 10% Dextran 40 and 5% Dextrose, 20% Human Serum Albumin, and 7.5% DMSO or other suitable cell freezing media containing for example, Hespan and PlasmaLyte A, the cells then are frozen to −80° C. at a rate of 1° per minute and stored in the vapor phase of a liquid nitrogen storage tank. Other methods of controlled freezing may be used as well as uncontrolled freezing immediately at −20° C. or in liquid nitrogen.

### Pharmaceutical Compositions

[0546] The disclosure provides pharmaceutical compositions comprising immune cells edited using the gene editing systems of the disclosure, and/or expressing the siRNA of the disclosure, and comprising the engineered receptors of the disclosure and a pharmaceutically acceptable diluent, carrier or excipient. In some embodiments, the immune cell comprises an inhibitory receptor comprising a ligand binding domain specific to a class I major histocompatibility complex (MHC-I) molecule, or a peptide-MHC complex thereof; wherein expression and/or function of beta-2-microglobulin (B2M) in said immune cell has been reduced or eliminated. In some embodiments, the immune cell comprises an interfering RNA, comprising a sequence complementary to a sequence of a B2M mRNA. In some embodiments, the interfering RNA is capable of inducing RNAi-mediated degradation of the B2M mRNA. In some embodiments, the interfering RNA is a short hairpin RNA (shRNA) as described herein. In some embodiments, the immune cell further comprises an activator receptor as described herein.

[0547] Such compositions may comprise buffers such as neutral buffered saline, phosphate buffered saline and the like; carbohydrates such as glucose, mannose, sucrose or dextrans, mannitol; proteins; polypeptides or amino acids such as glycine; antioxidants; chelating agents such as EDTA or glutathione; and preservatives.

[0548] Provided herein are methods of producing an immune cell with reduced autocrine binding/signaling comprising transducing and/or transfecting the immune cell with a vector described herein. In some embodiments, the method comprises transducing the immune cell with a first vector comprising a sequence encoding an activator receptor and a second vector comprising a sequence encoding an inhibitory receptor, thereby producing an immune cell expressing the activator and inhibitory receptors. In some embodiments, the inhibitory receptor specifically binds to an HLA-A*02 pMHC antigen and the target gene comprises HLA-A*02. In some embodiments, prior to the transducing and/or transfecting steps, the immune cell comprises a polynucleotide or vector encoding interfering RNA targeting a B2M mRNA.

### Methods of Treating Disease

[0549] Provided herein are methods of treating a subject in need thereof, comprising administering to the subject a therapeutically effective amount of a composition comprising allogeneic immune cells comprising the engineered receptors and gene editing modifications of the disclosure. Provided herein are methods of treating a subject in need thereof, comprising administering to the subject a therapeutically effective amount of a composition comprising autologous immune cells comprising the engineered receptors and gene editing modifications of the disclosure. The immune cells express both engineered receptors in the same cell.

[0550] Provided herein are methods of treating a subject in need thereof, comprising administering to the subject a therapeutically effective amount of a composition comprising immune cells comprising the engineered receptors and having reduced or eliminated expression and/or function of B2M. In some embodiments, the immune cell comprises an interfering RNA (e.g. an shRNA), polynucleotide, vector, fusion protein, engineered receptor (e.g. an inhibitory receptor) of the disclosure.

[0551] In some embodiments, the method of treating a subject in need thereof comprises providing immune cells from a subject suffering from or at risk for cancer or a hematological malignancy; transducing the immune cell with the vectors described herein; and administering the immune cell to the subject.

[0552] Provided herein are methods of manufacturing a composition comprising immune cells with reduced autocrine binding/signaling comprising providing immune cells from a subject suffering from or at risk for cancer or a hematological malignancy; and transducing or transfecting the immune cell with one or more vectors described herein. In some embodiments, the vector encodes an interfering RNA targeting B2M mRNA. In some embodiments, the vector encodes an engineered receptor (e.g. an inhibitory receptor that specifically binds to HLA-A*02 pMHC antigen and the target gene comprises HLA-A*02. In some embodiments, prior to the transducing and/or transfecting steps, the immune cell comprises a polynucleotide encoding activator and/or inhibitory receptors. In some embodiments, the method comprises transducing the immune cell with a first vector comprising a sequence encoding the activator receptor and a second vector comprising a sequence encoding the inhibitory receptor, thereby producing an immune cell expressing the activator and inhibitory receptors.

[0553] The current method for adoptive cell therapy using autologous cells includes isolating immune cells from patient blood, performing a series of modifications on the isolated cells, and administering the cells to a patient (Papathanasiou et al. Cancer Gene Therapy. 27:799-809 (2020)). Providing immune cells from a subject suffering from or at risk for cancer or a hematological malignancy requires isolation of immune cell from the patient's blood, and can be accomplished through methods known in the art, for example, by leukapheresis. During leukapheresis, blood from a subject is extracted and the peripheral blood mononuclear cells (PBMCs) are separated, and the remainder of the blood is returned to the subject's circulation. The PBMCs are stored either frozen or cryopreserved as a sample of immune cells and provided for further processing steps, such as, e.g. the modifications described herein.

[0554] In some embodiments, the method of treating a subject described herein comprises modifications to immune cells from the subject comprising a series of modifications comprising enrichment, activation, genetic modification, expansion, formulation, and cryopreservation.

[0555] The disclosure provides enrichment steps that can be, for example, washing and fractionating methods known in the art for preparation of subject PBMCs for downstream procedures, e.g. the modifications described herein. For example, without limitation, methods can include devices to remove gross red blood cells and platelet contaminants, systems for size-based cell fractionation for the depletion of monocytes and the isolation of lymphocytes, and/or systems that allow the enrichment of specific subsets of T cells, such as, e.g. CD4+, CD8+, CD25+, or CD62L+ T cells. Following the enrichment steps, a target sub-population of immune cells will be isolated from the subject PMBCs for further processing. Those skilled in the art will appreciate that enrichment steps, as provided herein, may also encompass any newly discovered method, device, reagent or combination thereof.

[0556] The disclosure provides activation steps that can be any method known in the art to induce activation of immune cells, e.g. T cells, required for their ex vivo expansion. Immune cell activation can be achieved, for example, by culturing the subject immune cells in the presence of dendritic cells, culturing the subject immune cells in the presence of artificial antigen-presenting cells (AAPCs), or culturing the immune cells in the presence of irradiated K562-derived AAPCs. Other methods for activating subject immune cells can be, for example, culturing the immune cells in the presence of isolated activating factors and compositions, e.g. beads, surfaces, or particles functionalized with activating factors. Activating factors can include, for example, antibodies, e.g. anti-CD3 and/or anti-CD28 antibodies. Activating factors can also be, for example, cytokines, e.g. interleukin (IL)-2 or IL-21. Activating factors can also be costimulatory molecules, such as, for example, CD40, CD40L, CD70, CD80, CD83, CD86, CD137L, ICOSL, GITRL, and CD134L. Those skilled in the art will appreciate that activating factors, as provided herein, may also encompass any newly discovered activating factor, reagent, composition, or combination thereof that can activate immune cells.

[0557] The disclosure provides genetic modification steps for modifying the subject immune cells. In some embodiments, the genetic modification comprises transducing the immune cell with a vector comprising a shRNA described herein complementary to a B2M mRNA. In some embodiments, the method comprises transducing the immune cell with a first vector comprising a sequence encoding the activator receptor and a second vector comprising a sequence encoding the inhibitory receptor, thereby producing an immune cell expressing the activator and inhibitory receptors.

[0558] The disclosure provides expansion steps for the genetically modified subject immune cells. Genetically modified subject immune cells can be expanded in any immune cell expansion system known in the art to generate therapeutic doses of immune cells for administration. For example, bioreactor bags for use in a system comprising controller pumps, and probes that allow for automatic feeding and waste removal can be used for immune cell expansion. Cell culture flasks with gas-permeable membranes at the base may be used for immune cell expansion. Any such system known in the art that enables expansion of immune cells for clinical use is encompassed by the expansion step provided herein. Immune cells are expanded in culture systems in media formulated specifically for expansion. Expansion can also be facilitated by culturing the immune cell of the disclosure in the presence of activation factors as described herein. Those skilled in the art will appreciate that expansion steps, as provided herein, may also encompass any newly discovered culture systems, media, or activating factors that can be used to expand immune cells.

[0559] The disclosure provides formulation and cryopreservation steps for the expanded genetically modified subject immune cells. Formulation steps provided include, for example, washing away excess components used in the preparation and expansion of immune cells of the methods of treatment described herein. Any pharmaceutically acceptable formulation medium or wash buffer compatible with immune cell known in the art may be used to wash, dilute/concentration immune cells, and prepare doses for administration. Formulation medium can be acceptable for administration of the immune cells, such as, for example crystalloid solutions for intravenous infusion. Cryopreservation can optionally be used to store immune cells long-term. Cryopreservation can be achieved using known methods in the art, including for example, storing cells in a cryopreservation medium containing cryopreservation components. Cryopreservation components can include, for example, dimethyl sulfoxide or glycerol. Immune cells stored in cryopreservation medium can be cryopreserved by reducing the storage temperature to −80° C. to −180° C.

[0560] In some embodiments, the method comprises administering immune cells described herein. In some embodiments, the method comprises administering a conditioning regimen prior to administering the immune cells described herein. In some embodiments, the conditioning regimen is lymphodepletion. A lymphodepletion regimen can include, for example, administration of alemtuzumab, cyclophosphamide, benduamustin, rituximab, pentostatin, and/or fludarabine. Lymphodepletion regimen can be administered in one or more cycles until the desired outcome of reduced circulating immune cells.

[0561] In some embodiments, the conditioning regimen comprises administering an agent that specifically targets, and reduces or eliminates CD52+ cells in the subject, and the immune cells are modified to reduce or eliminate CD52 expression.

[0562] In some embodiments, the method of treatment comprises determining the HLA germline type of the subject. In some embodiments, determining the HLA germline type comprises determining the presence of HLA-A*02:01 heterozygosity. In some embodiments, the HLA germline type is determined in bone marrow.

[0563] In some embodiments, the method of treatment comprises determining the level of expression of an activator ligand. In some embodiments, the level of expression of an activator ligand is determined in tumor tissue samples from the subject. In some embodiments, the expression level of an activator ligand is determined using next generation sequencing. In some embodiments, the expression level of an activator ligand is determined using RNA sequencing. In some embodiments, the level of an activator ligand is determined using immunohistochemistry.

[0564] In some embodiments, the method of treatment comprises administering a therapeutically effective dose of immune cells in a subject in need thereof, wherein the subject is determined to be HLA germline HLA-A*02:01 heterozygous and have tumor tissue with activator expression and loss of HLA-A*02:01.

[0565] In some embodiments, a therapeutically effective dose of the immune cells described herein are administered. In some embodiments, the immune cells of the disclosure are administered by intravenous injection. In some embodiments, the immune cells of the disclosure are administered by intraperitoneal injection. In some embodiments, a therapeutically effective dose comprises about 0.5×10⁶ cells, about 1×10⁶ cells, about 2×10⁶ cells, about 3×10⁶ cells, 4×10⁶ cells, about 5×10⁶ cells, about 6×10⁶ cells, about 7×10⁶ cells, about 8×10⁶ cells, about 9×10⁶ cells, about 1×10⁷, about 2×10⁷, about 3×10⁷, about 4×10⁷, about 5×10⁷, about 6×10⁷, about 7×10⁷, about 8×10⁷, about 9×10⁷, 1×10⁸ cells, about 2×10⁸ cells, about 3×10⁸ cells, about 4×10⁸ cells, about 5×10⁸ cells, or about 6×10⁸ cells. In some embodiments, a therapeutically effective dose comprises about 0.5×10⁶ cells to about 6×10⁸ cells, about 1×10⁶ cells to about 5×10⁸ cells, about 2×10⁶ cells to about 5×10⁸ cells, about 3×10⁶ cells to about 4×10⁸ cells, about 4×10⁶ cells to about 3×10⁸ cells, about 5×10⁶ cells to about 2×10⁸ cells, about 6×10⁶ cells to about 1×10⁸ cells, about 7×10⁶ cells to about 9×10⁷ cells, about 8×10⁶ cells to about 8×10⁷ cells, about 9×10⁶ cells to about 7×10⁷ cells, about 1×10⁷ cells to about 6×10⁷ cells, or about 2×10⁷ cells to about 5×10⁷ cells. In some embodiments, a therapeutically effective dose comprises about 0.5×10⁶ cells to about 6×10⁸ cells. The term “about” as referred to in a therapeutically dose, can be, for example, ±0.5×10⁶ cells, ±0.5×10⁷ cells, or ±0.5×10⁸ cells.

[0566] In some embodiments, the subject in need thereof has cancer. Cancer is a disease in which abnormal cells divide without control and spread to nearby tissue. In some embodiments, the cancer comprises a liquid tumor or a solid tumor. Exemplary liquid tumors include leukemias and lymphomas. Further cancers that are liquid tumors can be those that occur, for example, in blood, bone marrow, and lymph nodes, and can include, for example, leukemia, myeloid leukemia, lymphocytic leukemia, lymphoma, Hodgkin's lymphoma, melanoma, and multiple myeloma. Leukemias include, for example, acute lymphoblastic leukemia (ALL), acute myeloid leukemia (AML), chronic lymphocytic leukemia (CLL), chronic myelogenous leukemia (CIVIL), and hairy cell leukemia. Exemplary solid tumors include sarcomas and carcinomas. Cancers can arise in virtually an organ in the body, including blood, bone marrow, lung, breast, colon, bone, central nervous system, pancreas, prostate and ovary. Further cancers that are solid tumors include, for example, prostate cancer, testicular cancer, breast cancer, brain cancer, pancreatic cancer, colon cancer, thyroid cancer, stomach cancer, lung cancer, ovarian cancer, Kaposi's sarcoma, skin cancer, squamous cell skin cancer, renal cancer, head and neck cancers, throat cancer, squamous carcinomas that form on the moist mucosal linings of the nose, mouth, throat, bladder cancer, osteosarcoma, cervical cancer, endometrial cancer, esophageal cancer, liver cancer, and kidney cancer. In some embodiments, the condition treated by the methods described herein is metastasis of melanoma cells, prostate cancer cells, testicular cancer cells, breast cancer cells, brain cancer cells, pancreatic cancer cells, colon cancer cells, thyroid cancer cells, stomach cancer cells, lung cancer cells, ovarian cancer cells, Kaposi's sarcoma cells, skin cancer cells, renal cancer cells, head or neck cancer cells, throat cancer cells, squamous carcinoma cells, bladder cancer cells, osteosarcoma cells, cervical cancer cells, endometrial cancer cells, esophageal cancer cells, liver cancer cells, or kidney cancer cells.

[0567] Any cancer wherein a plurality of the cancer cells express the first, activator ligand and do not express the second, inhibitor ligand is envisaged as within the scope of the instant disclosure. For example, CEA positive cancers that can be treated using the methods described herein include colorectal cancer, pancreatic cancer, esophageal cancer, gastric cancer, lung adenocarcinoma, head and neck cancer, diffuse large B cell cancer or acute myeloid leukemia.

[0568] As a further example, EGFR positive cancers that can be treated using the methods described herein include lung cancer, small cell lung cancer, non-small cell lung cancer, pancreatic ductal carcinoma, colorectal cancer, head and neck cancer, esophagus and gastric adenocarcinoma, ovarian cancer, glioblastoma multiforme, cervical squamous cell carcinoma, kidney cancer, papillary kidney cancer, kidney renal clear cell carcinoma, bladder cancer, breast cancer, bile duct cancer, liver cancer, prostate cancer, sarcoma, thyroid cancer, thymus cancer, stomach cancer, or uterine cancer, and all-other EGFR target expressing tumors. The compositions and methods disclosure herein may be used to treating EGFR positive cancers that are relapsed, refractory and/or metastatic.

[0569] As a further example, MSNL positive cancers that ca be treated using the methods described herein include mesothelioma cancer, ovarian cancer, cervical cancer, colorectal cancer, esophageal cancer, head and neck cancer, kidney cancer, uterine cancer, gastric cancer, pancreatic cancer, lung cancer, lung adenocarcinomas, colorectal cancer, or cholangiocarcinoma, as well as other solid epithelial tumors. Further cancers that express MSLN include relapsed, refractory or metastatic gastric, esophageal, head and neck and kidney cancers. In some embodiments, the MSLN positive cancer comprises an epithelial tumor, for example a carcinoma.

[0570] Treating cancer can result in a reduction in size of a tumor. A reduction in size of a tumor may also be referred to as “tumor regression”. Preferably, after treatment, tumor size is reduced by 5% or greater relative to its size prior to treatment; more preferably, tumor size is reduced by 10% or greater; more preferably, reduced by 20% or greater; more preferably, reduced by 30% or greater; more preferably, reduced by 40% or greater; even more preferably, reduced by 50% or greater; and most preferably, reduced by greater than 75% or greater. Size of a tumor may be measured by any reproducible means of measurement. The size of a tumor may be measured as a diameter of the tumor.

[0571] Treating cancer can result in a reduction in tumor volume. Preferably, after treatment, tumor volume is reduced by 5% or greater relative to its size prior to treatment; more preferably, tumor volume is reduced by 10% or greater; more preferably, reduced by 20% or greater; more preferably, reduced by 30% or greater; more preferably, reduced by 40% or greater; even more preferably, reduced by 50% or greater; and most preferably, reduced by greater than 75% or greater. Tumor volume may be measured by any reproducible means of measurement.

[0572] Treating cancer results in a decrease in number of tumors. Preferably, after treatment, tumor number is reduced by 5% or greater relative to number prior to treatment; more preferably, tumor number is reduced by 10% or greater; more preferably, reduced by 20% or greater; more preferably, reduced by 30% or greater; more preferably, reduced by 40% or greater; even more preferably, reduced by 50% or greater; and most preferably, reduced by greater than 75%. Number of tumors may be measured by any reproducible means of measurement. The number of tumors may be measured by counting tumors visible to the naked eye or at a specified magnification. Preferably, the specified magnification is 2×, 3×, 4×, 5×, 10×, or 50×.

[0573] Treating cancer can result in a decrease in number of metastatic lesions in other tissues or organs distant from the primary tumor site. Preferably, after treatment, the number of metastatic lesions is reduced by 5% or greater relative to number prior to treatment; more preferably, the number of metastatic lesions is reduced by 10% or greater; more preferably, reduced by 20% or greater; more preferably, reduced by 30% or greater; more preferably, reduced by 40% or greater; even more preferably, reduced by 50% or greater; and most preferably, reduced by greater than 75%. The number of metastatic lesions may be measured by any reproducible means of measurement. The number of metastatic lesions may be measured by counting metastatic lesions visible to the naked eye or at a specified magnification. Preferably, the specified magnification is 2×, 3×, 4×, 5×, 10×, or 50×.

[0574] Treating cancer can result in an increase in average survival time of a population of treated subjects in comparison to a population receiving carrier alone. Preferably, the average survival time is increased by more than 30 days; more preferably, by more than 60 days; more preferably, by more than 90 days; and most preferably, by more than 120 days. An increase in average survival time of a population may be measured by any reproducible means. An increase in average survival time of a population may be measured, for example, by calculating for a population the average length of survival following initiation of treatment with an active compound. An increase in average survival time of a population may also be measured, for example, by calculating for a population the average length of survival following completion of a first round of treatment with an active compound.

[0575] Treating cancer can result in an increase in average survival time of a population of treated subjects in comparison to a population of untreated subjects. Preferably, the average survival time is increased by more than 30 days; more preferably, by more than 60 days; more preferably, by more than 90 days; and most preferably, by more than 120 days. An increase in average survival time of a population may be measured by any reproducible means. An increase in average survival time of a population may be measured, for example, by calculating for a population the average length of survival following initiation of treatment with an active compound. An increase in average survival time of a population may also be measured, for example, by calculating for a population the average length of survival following completion of a first round of treatment with an active compound.

[0576] Treating cancer can result in increase in average survival time of a population of treated subjects in comparison to a population receiving monotherapy with a drug that is not a compound of the present invention, or a pharmaceutically acceptable salt, prodrug, metabolite, analog or derivative thereof. Preferably, the average survival time is increased by more than 30 days; more preferably, by more than 60 days; more preferably, by more than 90 days; and most preferably, by more than 120 days. An increase in average survival time of a population may be measured by any reproducible means. An increase in average survival time of a population may be measured, for example, by calculating for a population the average length of survival following initiation of treatment with an active compound. An increase in average survival time of a population may also be measured, for example, by calculating for a population the average length of survival following completion of a first round of treatment with an active compound.

[0577] Treating cancer can result in a decrease in the mortality rate of a population of treated subjects in comparison to a population receiving carrier alone. Treating cancer can result in a decrease in the mortality rate of a population of treated subjects in comparison to an untreated population. Treating cancer can result in a decrease in the mortality rate of a population of treated subjects in comparison to a population receiving monotherapy with a drug that is not a compound of the present invention, or a pharmaceutically acceptable salt, prodrug, metabolite, analog or derivative thereof. Preferably, the mortality rate is decreased by more than 2%; more preferably, by more than 5%; more preferably, by more than 10%; and most preferably, by more than 25%. A decrease in the mortality rate of a population of treated subjects may be measured by any reproducible means. A decrease in the mortality rate of a population may be measured, for example, by calculating for a population the average number of disease-related deaths per unit time following initiation of treatment with an active compound. A decrease in the mortality rate of a population may also be measured, for example, by calculating for a population the average number of disease-related deaths per unit time following completion of a first round of treatment with an active compound.

[0578] Treating cancer can result in a decrease in tumor growth rate. Preferably, after treatment, tumor growth rate is reduced by at least 5% relative to number prior to treatment; more preferably, tumor growth rate is reduced by at least 10%; more preferably, reduced by at least 20%; more preferably, reduced by at least 30%; more preferably, reduced by at least 40%; more preferably, reduced by at least 50%; even more preferably, reduced by at least 50%; and most preferably, reduced by at least 75%. Tumor growth rate may be measured by any reproducible means of measurement. Tumor growth rate can be measured according to a change in tumor diameter per unit time.

[0579] Treating cancer can result in a decrease in tumor regrowth. Preferably, after treatment, tumor regrowth is less than 5%; more preferably, tumor regrowth is less than 10%; more preferably, less than 20%; more preferably, less than 30%; more preferably, less than 40%; more preferably, less than 50%; even more preferably, less than 50%; and most preferably, less than 75%. Tumor regrowth may be measured by any reproducible means of measurement. Tumor regrowth is measured, for example, by measuring an increase in the diameter of a tumor after a prior tumor shrinkage that followed treatment. A decrease in tumor regrowth is indicated by failure of tumors to reoccur after treatment has stopped.

[0580] Treating or preventing a cell proliferative disorder can result in a reduction in the rate of cellular proliferation. Preferably, after treatment, the rate of cellular proliferation is reduced by at least 5%; more preferably, by at least 10%; more preferably, by at least 20%; more preferably, by at least 30%; more preferably, by at least 40%; more preferably, by at least 50%; even more preferably, by at least 50%; and most preferably, by at least 75%. The rate of cellular proliferation may be measured by any reproducible means of measurement. The rate of cellular proliferation is measured, for example, by measuring the number of dividing cells in a tissue sample per unit time.

[0581] Treating or preventing a cell proliferative disorder can result in a reduction in the proportion of proliferating cells. Preferably, after treatment, the proportion of proliferating cells is reduced by at least 5%; more preferably, by at least 10%; more preferably, by at least 20%; more preferably, by at least 30%; more preferably, by at least 40%; more preferably, by at least 50%; even more preferably, by at least 50%; and most preferably, by at least 75%. The proportion of proliferating cells may be measured by any reproducible means of measurement. Preferably, the proportion of proliferating cells is measured, for example, by quantifying the number of dividing cells relative to the number of nondividing cells in a tissue sample. The proportion of proliferating cells can be equivalent to the mitotic index.

[0582] Treating or preventing a cell proliferative disorder can result in a decrease in size of an area or zone of cellular proliferation. Preferably, after treatment, size of an area or zone of cellular proliferation is reduced by at least 5% relative to its size prior to treatment; more preferably, reduced by at least 10%; more preferably, reduced by at least 20%; more preferably, reduced by at least 30%; more preferably, reduced by at least 40%; more preferably, reduced by at least 50%; even more preferably, reduced by at least 50%; and most preferably, reduced by at least 75%. Size of an area or zone of cellular proliferation may be measured by any reproducible means of measurement. The size of an area or zone of cellular proliferation may be measured as a diameter or width of an area or zone of cellular proliferation.

[0583] Treating or preventing a cell proliferative disorder can result in a decrease in the number or proportion of cells having an abnormal appearance or morphology. Preferably, after treatment, the number of cells having an abnormal morphology is reduced by at least 5% relative to its size prior to treatment; more preferably, reduced by at least 10%; more preferably, reduced by at least 20%; more preferably, reduced by at least 30%; more preferably, reduced by at least 40%; more preferably, reduced by at least 50%; even more preferably, reduced by at least 50%; and most preferably, reduced by at least 75%. An abnormal cellular appearance or morphology may be measured by any reproducible means of measurement. An abnormal cellular morphology can be measured by microscopy, e.g., using an inverted tissue culture microscope. An abnormal cellular morphology can take the form of nuclear pleiomorphism.

### Kits and Articles of Manufacture

[0584] The disclosure provides kits and articles of manufacture comprising the polynucleotides and vectors encoding the engineered receptors described herein, and immune cells comprising the engineered receptors described herein (e.g., edited using gene editing systems described herein and/or comprising the engineered receptors described herein). In some embodiments, the polynucleotides and vectors comprise sequences of the siRNAs described herein, or sequences encoding same. In some embodiments, the kit comprises articles such as vials, syringes and instructions for use.

[0585] In some embodiments, the kit comprises a polynucleotide or vector comprising a sequence encoding one or more engineered receptors of the disclosure.

[0586] In some embodiments, the kit comprises a plurality of immune cells comprising an engineered receptor as described herein. In some embodiments, the plurality of immune cells comprises a plurality of T cells.

[0587] The disclosure provides kits and articles of manufacture comprising the polynucleotides and vectors encoding the interfering RNAs and engineered receptors described herein, and immune cells with reduced or eliminated B2M expression and/or function described herein and comprising the engineered receptors described herein. In some embodiments, the kit comprises articles such as vials, syringes and instructions for use.

[0588] In some embodiments, the kit comprises a polynucleotide or vector comprising a sequence encoding the interfering RNAs and/or one or more engineered receptors of the disclosure.

[0589] In some embodiments, the kit comprises a plurality of immune cells comprising an interfering RNA and/or engineered receptor as described herein. In some embodiments, the plurality of immune cells comprises a plurality of T cells.

### EXAMPLES

### Example 1

### Selection of Interfering RNA Sequences Targeting the B2M Gene

[0590] In order to select guide nucleic acids for targeting the B2M gene, all possible 18bp, 19bp, 20bp, 21bp, and 22bp transcribed sequences corresponding to B2M mRNA were determined, yielding 4620 sequences. From this set of putative target sequences, those containing GC content less than 25% or greater than or equal to 60% were excluded, resulting in 3596 potential target sequences. From this set of potential target sequences, those with runs of 4 or more of the same base in a row or a run of 7 C or G bases in a row were removed, resulting in 3000 potential target sequences. The set was further reduced by removing all potential sequence that were not 21 bp long, resulting in 582 potential target sequences. Next, the sequences were analyzed by identifying favorable characteristics identified by computational tools, such as the GPP RNAi Designer (Broad Institute), and similar favorable characteristics. The final set of potential targets included 282 sequences that can be used to design interfering RNAs that target the B2M mRNA transcript for degradation through RNA interference. Illustrative alignments between shRNAs with a complementary sequence to the identified targets of the analysis are shown in FIG. 5.

### Example 2

### shRNA-Mediated Reduction of B2M Expression Reduces Class I HLA Expression

[0591] The effect of shRNA mediated reduction of B2M expression on Class I HLA expression was assessed.

[0592] Jurkat cells expressing HLA-A*02 were transfected using 100 uL format Neon electroporation system (Thermo Fisher) according to manufacturer's protocol using the following settings: 3 pulses, 1500V, 10 msec. Co-transfections were performed with 300 ng of U6-shRNA plasmids and 1.2ug of plasmid expressing EGFR as a transfection marker per 1 million cells. Transfected cells were recovered in RPMI media supplemented with 20% heat-inactivated FBS and 0.1% Pen/Strep.

[0593] 4 days following transfection, cells were stained for HLA-A*02 expression with BB7.2 antibody (Biolegend) and/or HLA Class I expression W6/32 antibody (BD Biosciences) and anti-EGFR antibody (Biolegend) for 30 minutes at 4° C. to assess knockdown efficiency.

[0594] The results are shown in FIG. 6. The histograms show staining for either HLA-A*02 or HLA Class I, and corresponding quantification as % expression in control cells. The results indicate that several of the shRNA candidates were able to reduce expression of HLA-A*02 and HLA Class I. In particular, shRNA-03, shRNA-04, shRNA-54, and shRNA-89 showed greater than 50% decrease compared to control cells.

[0595] These results indicate shRNA mediated reduced expression of B2M results in reduced expression of HLA-A*02 and HLA Class I molecules in immune cells.

### Example 3

### shRNA-Mediated Reduction of B2M Expression Increases Blocker Receptor Availability and Restores Blocker Receptor Function in HLA-A*02 Positive Jurkat Cells

[0596] The effect of shRNA mediated reduction of of B2M expression on blocker ligand binding receptors was determined in Jurkat cells expressing HLA-A*02. (FIGS. 7).

[0597] A2− and A2+ transduced Jurkat cells were transfected using 100 uL format Neon electroporation system (Thermo Fisher) according to manufacturer's protocol using the following settings: 3 pulses, 1500V, 10 msec. Co-transfections were performed with 2 ug CAR plasmids and 2 ug of either U6-shRNA/A*02-blocker or A*02-blocker alone per million cells. Transfected cells were recovered in RPMI media supplemented with 20% heat-inactivated FBS and 0.1% Pen/Strep.

[0598] Jurkat cells that either express HLA-A*02 (A2+ Jurkat) or do not express HLA-A*02 (A2+ Jurkat) were transfected using 100 uL format Neon electroporation system (Thermo Fisher) according to manufacturer's protocol using the following settings: 3 pulses, 1500V, 10 msec. Co-transfections were performed with 2 ug plasmids encoding activator and inhibitory receptors, and 2 ug of either U6-shRNA/A*02-blocker or A*02-blocker alone per million cells. Transfected cells were recovered RPMI media supplemented with 20% heat-inactivated FBS and 0.1% Pen/Strep.

[0599] 2 days following transfection, 10⁴ jurkat cells were co-cultured with 1.2×10⁴ HeLa target cells and incubated in Corning® 384-well Low Flange White Flat Bottom Polystyrene TC-treated Microplates for 6 hours. ONE-Step Luciferase Assay System (BPS Bioscience) was used to evaluate Jurkat luminescence. To evaluate blocker availability to bind HLA-A*02 antigen, Jurkat cells were stained with 10 ug/mL streptavidin-PE-HLA-A*02-pMHC or streptavidin-APC-HLA-A*02-pMHC tetramer for 30 minutes at 4° C. in PBS with 1% BSA and characterized by flow cytometry (BD FACSCanto II). Histograms show all cells.

[0600] Results are shown in FIG. 7. In A2+ Jurkat effector cells in the absence of shRNA targeting B2M, activation of the CAR/TCR receptor occurred in the presence of target cells expressing the activator ligand and the HLA-A*02 blocker ligand, as well as in the presence of target cells expressing the activator ligand only. In contrast, A2− Jurkat effector cells showed significantly less CAR/TCR activation in the presence of target cells expressing the activator ligand and the HLA-A*02 blocker ligand. The A*02 blocker functions to inhibit T cell activation, which was observed in A2− Jurkat effector cells co-cultured with target cells expressing HLA-A*02 but not in A230 Jurkat effector cells co-cultured with target cells expression HLA-A*02. This result indicates that expression of HLA-A*02 in Jurkat effector cells expressing an activator CAR/TCR and A*02 blocker interferes with A*02 inhibitory receptor function. In A2+ Jurkat effector cells transfected with shRNA targeting the B2M expression, CAR/TCR activation was inhibited in the presence of target cells expressing the HLA-A*02 blocker ligand, but not in the presence of target cells lacking expression of the HLA-A*02 blocker ligand. This result indicates that shRNA mediated reduction of B2M expression can restore A*02 blocker function in the A2+ Jurkat cells.

[0601] In Jurkat cells stained with the fluorescently labeled probe that binds the A*02 blocker, FACS analysis shows the availability, or binding capacity, of the A*02 blocker receptor (inhibitory receptor). In A2− Jurkat cells, histograms from the FACS analysis shows staining of a subset of cells, indicating availability of the A*02 blocker receptor. In contrast, in A2+ Jurkat cells, there is a shift in the histogram, showing the population of cells has little to no A*02 blocker receptor availability and another ill-defined population with incomplete A*02 blocker receptor availability. However, transfection in A2+ Jurkat cells with shRNA targeting the B2M expression shifted the histogram to resemble the A2− population, indicating near complete availability of the A*02 blocker receptor.

[0602] Taken together, the results of these experiments show that in Jurkat cells expressing 1) a CAR or TCR that binds an activator ligand and 2) an engineered receptor that binds an HLA-A*02 blocker ligand (A*02 blocker), expression of HLA-A*02 interferes with A*02 blocker receptor function and A*02 blocker binding capacity. Further, the results show that shRNA mediated reduction of B2M expression restores A*02 blocker function and binding capacity.

1. An immune cell comprising
an inhibitory receptor comprising a ligand binding domain specific to a class I major histocompatibility complex (MHC-I) molecule, or a peptide-MHC complex thereof;
wherein expression and/or function of beta-2-microglobulin (B2M) in said immune cell has been reduced or eliminated.

2. The immune cell of claim 1, comprising an interfering RNA, comprising a sequence complementary to a sequence of a B2M mRNA.

3. The immune cell of claim 2, wherein the interfering RNA is capable of inducing RNAi-mediated degradation of the B2M mRNA.

4. The immune cell of claim 3, wherein the interfering RNA is a short hairpin RNA (shRNA).

5. The immune cell of claim 4, wherein the shRNA comprises
a. a first sequence, having from 5′ end to 3′ end a sequence complementary to the B2M mRNA; and
b. a second sequence, having from 5′ end to 3′ end a sequence complementary to the first sequence,
wherein the first sequence and the second sequence form the shRNA.

6. The immune cell of claim 5, wherein the B2M mRNA sequence comprises a part of a coding sequence.

7. The immune cell of claim 5, wherein the B2M mRNA sequence comprises a part of an untranslated region.

8. The immune cell of any one of claim 1, wherein the first sequence is 18, 19, 20, 21, or 22 nucleotides.

9. The immune cell of claim 8, wherein the first sequence is complementary to a sequence selected from SEQ ID NOs: 400-5019.

10. The immune cell of claim 8, wherein the first sequence has GC content greater than or equal to 25% and less than 60%.

11. The immune cell of claim 10, wherein the first sequence is complementary to a sequence selected from SEQ ID NOs: 400-3995.

12. The immune cell of claim 10, wherein the first sequence does not comprise 4 nucleotides of the same base or a run of seven C or G bases.

13. The immune cell of claim 12, wherein the first sequence is complementary to a sequence selected from SEQ ID NOs: 400-3399.

14. The immune cell of claim 12, wherein the first sequence is 21 nucleotides.

15. The immune cell of claim 14, wherein the first sequence is complementary to a sequence selected from SEQ ID NOs: 400-981.

16. The immune cell of claim 14, wherein the first sequence is selected from SEQ ID NOs: 400-681 or SEQ ID NOs: 400-537.

17. The immune cell of claim 5, wherein the first sequence and second sequence are present on a single stranded polynucleotide, wherein the first sequence and second sequence are separated by 4, 5, 6, 7, 8, 9, 10, 11, 12, 13, 14, or 15 nucleotides, wherein the 4, 5, 6, 7, 8, 9, 10, 11, 12, 13, 14, or 15 nucleotides form a loop region in the shRNA.

18. The immune cell of claim 17, wherein the loop region comprises a sequence selected from SEQ ID NOs: 5030-5043.

19. The immune cell of claim 1, wherein the shRNA further comprises a 5′ flank sequence and a 3′ flank sequence, wherein the 5′ flank sequence is joined to the 5′ end of the first sequence, and wherein the 3′ flank sequence is joined to the 3′ end of the second sequence.

20. The immune cell of claim 19, wherein the 5′ flank sequence is selected from SEQ ID NO: 5044-5047.

21. The immune cell of claim 19, wherein the 3′ flank sequence is selected from SEQ ID NO: 5048-5050.

22. The immune cell of claim 1, wherein the shRNA is operably linked to a promoter.

23. (canceled)

24. The immune cell of claim 22, wherein the promoter is selected from a U6 promoter, a wild-type H1 promoter, a wild-type 7SK promoter, an Ef1a promoter.

25. The immune cell of claim 24, wherein the promoter sequence is selected from SEQ ID NOs: 5051-5054.

26. The immune cell of claim 1, wherein the immune cell is a T cell, B cell, or Natural Killer (NK) cell.

27. The immune cell of claim 1, wherein the immune cell is autologous to a subject.

28. The immune cell of claim 1, wherein the immune cell is allogeneic to a subject.

29. The immune cell of claim 1, wherein the immune cell is non-natural.

30.-32. (canceled)

33. A pharmaceutical composition, comprising a plurality of the immune cells of claim 1.

34.-35. (canceled)

36. A method of treating cancer with an adoptive cell therapy, comprising administering to the subject a plurality of the immune cell of claim 1.

37. (canceled)

38. A vector comprising an interfering RNA, wherein the interfering RNA comprises an shRNA that targets a B2M mRNA sequence, wherein the shRNA comprises
a. a first sequence, having from 5′ to 3′ a sequence complementary to the B2M mRNA; and
b. a second sequence, having from 5′ to 3′ end a sequence complementary to the first sequence,
wherein the first sequence and the second sequence form the shRNA structure.

39-65. (canceled)

66. A method of manufacturing a composition comprising immune cells with reduced autocrine binding/signaling comprising:
a. providing immune cells from a subject suffering from or at risk for cancer or a hematological malignancy; and
b. transducing and/or transfecting the immune cell with the vector of claim 38.

67.-68. (canceled)

69. A method of treating a subject in need thereof comprising:
a. providing immune cells from a subject suffering from or at risk for cancer or a hematological malignancy;
b. transducing the immune cell with the vector of claim 38; and
c. administering the immune cell to the subject.

The application's sequence listing, which the Patent Office published only in electronic form, follows.

SEQUENCE LISTING (5476 sequences)

SEQ ID NO: 1 - protein, 45 aa, Artificial Sequence
  CD8alpha hinge
TTTPAPRPPTPAPTIASQPLSLRPEACRPAAGGAVHTRGLDFACD

SEQ ID NO: 2 - DNA, 135 bp, Artificial Sequence
  CD8alpha hinge
accacgacgccagcgccgcgaccaccaacaccggcgcccaccatcgcgtcgcagcccctgtccctgcgcccagaggcgtgccggccagcggcggggggcgcagtgcacacgagggggctggacttcgcctgtgat

SEQ ID NO: 3 - protein, 41 aa, Artificial Sequence
  CD28 hinge
CTIEVMYPPPYLDNEKSNGTIIHVKGKHLCPSPLFPGPSKP

SEQ ID NO: 4 - DNA, 123 bp, Artificial Sequence
  CD28 hinge
tgtaccattgaagttatgtatcctcctccttacctagacaatgagaagagcaatggaaccattatccatgtgaaagggaaacacctttgtccaagtcccctatttcccggaccttctaagccc

SEQ ID NO: 5 - protein, 27 aa, Artificial Sequence
  CD28 transmembrane domain
FWVLVVVGGVLACYSLLVTVAFIIFWV

SEQ ID NO: 6 - DNA, 81 bp, Artificial Sequence
  CD28 transmembrane domain
ttctgggtgctggtcgttgtgggcggcgtgctggcctgctacagcctgctggtgacagtggccttcatcatcttttgggtg

SEQ ID NO: 7 - protein, 25 aa, Artificial Sequence
  IL-2R beta transmembrane domain
IPWLGHLLVGLSGAFGFIILVYLLI

SEQ ID NO: 8 - DNA, 75 bp, Artificial Sequence
  IL-2R beta transmembrane domain
attccgtggctcggccacctcctcgtgggcctcagcggggcttttggcttcatcatcttagtgtacttgctgatc

SEQ ID NO: 9 - protein, 112 aa, Artificial Sequence
  CD3 zeta activation domain
RVKFSRSADAPAYKQGQNQLYNELNLGRREEYDVLDKRRGRDPEMGGKPRRKNPQEGLYNELQKDKMAEAYSEIGMKGERRRGKGHDGLYQGLSTATKDTYDALHMQALPPR

SEQ ID NO: 10 - DNA, 336 bp, Artificial Sequence
  CD3 zeta activation domain
agagtgaagttcagcaggagcgcagacgcccccgcgtacaagcagggccagaaccagctctataacgagctcaatctaggacgaagagaggagtacgatgttttggacaagcgtagaggccgggaccctgagatggggggaaagccgagaaggaagaaccctcaggaaggcctgtacaatgaactgcagaaagataagatggcggaggcctacagtgagattgggatgaaaggcgagcgccggaggggcaaggggcacgatggcctttaccagggactcagtacagccaccaaggacacctacgacgcccttcacatgcaggccctgccccctcgc

SEQ ID NO: 11 - protein, 43 aa, Artificial Sequence
  CD3 zeta activation domain
RVKFSRSADAPAYQQGQNQLYNELNLGRREEYDVLHMQALPPR

SEQ ID NO: 12 - DNA, 129 bp, Artificial Sequence
  CD3 zeta activation domain
agagtgaagttcagcaggagcgcagacgcccccgcgtaccagcagggccagaaccagctctataacgagctcaatctaggacgaagagaggagtacgatgttttgcacatgcaggccctgccccctcgc

SEQ ID NO: 13 - protein, 41 aa, Artificial Sequence
  CD28 co-stimulatory domain
RSKRSRLLHSDYMNMTPRRPGPTRKHYQPYAPPRDFAAYRS

SEQ ID NO: 14 - DNA, 123 bp, Artificial Sequence
  CD28 co-stimulatory domain
aggagcaagcggagcagactgctgcacagcgactacatgaacatgaccccccggaggcctggccccacccggaagcactaccagccctacgcccctcccagggatttcgccgcctaccggagc

SEQ ID NO: 15 - protein, 94 aa, Artificial Sequence
  IL-2-Rbeta intracellular domain
NCRNTGPWLKKVLKCNTPDPSKFFSQLSSEHGGDVQKWLSSPFPSSSFSPGGLAPEISPLEVLERDKVTQLLPLNTDAYLSLQELQGQDPTHLV

SEQ ID NO: 16 - DNA, 282 bp, Artificial Sequence
  IL-2-Rbeta intracellular domain
aactgcaggaacaccgggccatggctgaagaaggtcctgaagtgtaacaccccagacccctcgaagttcttttcccagctgagctcagagcatggaggcgacgtccagaagtggctctcttcgcccttcccctcatcgtccttcagccctggcggcctggcacctgagatctcgccactagaagtgctggagagggacaaggtgacgcagctgctccccctgaacactgatgcctacttgtctctccaagaactccagggtcaggacccaactcacttggtg

SEQ ID NO: 17 - protein, 4 aa, Artificial Sequence
  STAT5 recruitment motif
YLSL

SEQ ID NO: 18 - protein, 760 aa, Homo sapiens
MMDQARSAFSNLFGGEPLSYTRFSLARQVDGDNSHVEMKLAVDEEENADNNTKANVTKPKRCSGSICYGTIAVIVFFLIGFMIGYLGYCKGVEPKTECERLAGTESPVREEPGEDFPAARRLYWDDLKRKLSEKLDSTDFTSTIKLLNENSYVPREAGSQKDENLALYVENQFREFKLSKVWRDQHFVKIQVKDSAQNSVIIVDKNGRLVYLVENPGGYVAYSKAATVTGKLVHANFGTKKDFEDLYTPVNGSIVIVRAGKITFAEKVANAESLNAIGVLIYMDQTKFPIVNAELSFFGHAHLGTGDPYTPGFPSFNHTQFPPSRSSGLPNIPVQTISRAAAEKLFGNMEGDCPSDWKTDSTCRMVTSESKNVKLTVSNVLKEIKILNIFGVIKGFVEPDHYVVVGAQRDAWGPGAAKSGVGTALLLKLAQMFSDMVLKDGFQPSRSIIFASWSAGDFGSVGATEWLEGYLSSLHLKAFTYINLDKAVLGTSNFKVSASPLLYTLIEKTMQNVKHPVTGQFLYQDSNWASKVEKLTLDNAAFPFLAYSGIPAVSFCFCEDTDYPYLGTTMDTYKELIERIPELNKVARAAAEVAGQFVIKLTHDVELNLDYERYNSQLLSFVRDLNQYRADIKEMGLSLQWLYSARGDFFRATSRLTTDFGNAEKTDRFVMKKLNDRVMRVEYHFLSPYVSPKESPFRHVFWGSGSHTLPALLENLKLRKQNNGAFNETLFRNQLALATWTIQGAANALSGDVWDIDNEF

SEQ ID NO: 19 - DNA, 300 bp, Artificial Sequence
  CD3 epsilon intracellular domain
aagaatagaaaggccaaggccaagcctgtgacacgaggagcgggtgctggcggcaggcaaaggggacaaaacaaggagaggccaccacctgttcccaacccagactatgagcccatccggaaaggccagcgggacctgtattctggcctgaatcagcgcagaatcggcggaagcaggagcaagcggagcagactgctgcacagcgactacatgaacatgaccccccggaggcctggccccacccggaagcactaccagccctacgcccctcccagggatttcgccgcctaccggagctag

SEQ ID NO: 20 - DNA, 69 bp, Artificial SEquence
  TCR beta transmembrane domain
accatcctctatgagatcttgctagggaaggccaccttgtatgccgtgctggtcagtgccctcgtgctg

SEQ ID NO: 21 - protein, 4 aa, Artificial Sequence
  ITAM motif
  X (2)..(3): X can be any amino acid
YXXL

SEQ ID NO: 22 - DNA, 270 bp, Artificial Sequence
  CD3 gamma intracellular domain
ggacaggatggagttcgccagtcgagagcttcagacaagcagactctgttgcccaatgaccagctctaccagcccctcaaggatcgagaagatgaccagtacagccaccttcaaggaaaccagttgaggaggaatggcggaagcaggagcaagcggagcagactgctgcacagcgactacatgaacatgaccccccggaggcctggccccacccggaagcactaccagccctacgcccctcccagggatttcgccgcctaccggagctag

SEQ ID NO: 23 - protein, 10 aa, Artificial Sequence
  UTY peptide
  X (1)..(1): X is R or G
  X (6)..(6): X is E or A
  X (8)..(8): X is V or P
XESEEXSXSL

SEQ ID NO: 24 - protein, 9 aa, Artificial Sequence
  RPSY peptide
  X (8)..(8): X is V or L
TIRYPDPXI

SEQ ID NO: 25 - protein, 8 aa, Artificial Sequence
  UTY peptide
  X (5)..(5): X is H or R
  X (7)..(7): X is D or N
LPHNXTXL

SEQ ID NO: 26 - protein, 23 aa, Artificial Sequence
  TCR alpha transmembrane domain
VIGFRILLLKVAGFNLLMTLRLW

SEQ ID NO: 27 - DNA, 69 bp, Artificial Sequence
  TCR alpha transmembrane domain
gtgattgggttccgaatcctcctcctgaaagtggccgggtttaatctgctcatgacgctgcggctgtgg

SEQ ID NO: 28 - protein, 23 aa, Artificial Sequence
  TCR beta transmembrane domain
TILYEILLGKATLYAVLVSALVL

SEQ ID NO: 29 - protein, 21 aa, Artificial Sequence
  CD3 zeta transmembrane domain
LCYLLDGILFIYGVILTALFL

SEQ ID NO: 30 - protein, 89 aa, Artificial Sequence
  CD3 delta intracellular domain
GHETGRLSGAADTQALLRNDQVYQPLRDRDDAQYSHLGGNWARNKGGSRSKRSRLLHSDYMNMTPRRPGPTRKHYQPYAPPRDFAAYRS

SEQ ID NO: 31 - DNA, 269 bp, Artificial Sequence
  CD3 delta intracellular domain
ggacatgagactggaaggctgtctggggctgccgacacacaagctctgttgaggaatgaccaggtctatcagcccctccgagatcgagatgatgctcagtacagccaccttggaggaaactgggctcggaacaagggcggaagcaggagcaagcggagcagactgctgcacagcgactacatgaacatgaccccccggaggcctggccccacccggaagcactaccagccctacgcccctcccagggatttcgccgcctaccggagcta

SEQ ID NO: 32 - protein, 99 aa, Artificial Sequence
  CD3 epsilon intracellular domain
KNRKAKAKPVTRGAGAGGRQRGQNKERPPPVPNPDYEPIRKGQRDLYSGLNQRRIGGSRSKRSRLLHSDYMNMTPRRPGPTRKHYQPYAPPRDFAAYRS

SEQ ID NO: 33 - protein, 89 aa, Artificial Sequence
  CD3 gamma intracellular domain
GQDGVRQSRASDKQTLLPNDQLYQPLKDREDDQYSHLQGNQLRRNGGSRSKRSRLLHSDYMNMTPRRPGPTRKHYQPYAPPRDFAAYRS

SEQ ID NO: 34 - protein, 11 aa, Artificial Sequence
  SMCY peptide
  X (3)..(3): X is S or A
  X (8)..(8): X is R or Q
SPXVDKAXAEL

SEQ ID NO: 35 - protein, 10 aa, Artificial Sequence
  TCR beta intracellular domain
MAMVKRKDSR

SEQ ID NO: 36 - DNA, 30 bp, Artificial Sequence
  TCR beta intracellular domain
atggccatggtcaagagaaaggattccaga

SEQ ID NO: 37 - protein, 41 aa, Artificial Sequence; identical to SEQ ID NO: 13
  CD28 intracellular domain

SEQ ID NO: 38 - DNA, 123 bp, Artificial Sequence; identical to SEQ ID NO: 14
  CD28 intracellular domain

SEQ ID NO: 39 - protein, 42 aa, Artificial Sequence
  4-1BB intracellular domain
KRGRKKLLYIFKQPFMRPVQTTQEEDGCSCRFPEEEEGGCEL

SEQ ID NO: 40 - DNA, 126 bp, Artificial Sequence
  4-1BB intracellular domain
aaacggggcagaaagaaactcctgtatatattcaaacaaccatttatgaggccagtacaaactactcaagaggaagatggctgtagctgccgatttccagaagaagaagaaggaggatgtgaactg

SEQ ID NO: 41 - protein, 16 aa, Artificial Sequence
  HLA-A*02 CDR-L1
RSSQSIVHSNGNTYLE

SEQ ID NO: 42 - protein, 12 aa, Artificial Sequence
  HLA-A*02 CDR-L2
KVSNRFSGVPDR

SEQ ID NO: 43 - protein, 9 aa, Artificial Sequence
  HLA-A*02 CDR-L3
FQGSHVPRT

SEQ ID NO: 44 - protein, 12 aa, Artificial Sequence
  HLA-A*02 CDR-H1
ASGYTFTSYHIH

SEQ ID NO: 45 - protein, 18 aa, Artificial Sequence
  HLA-A*02 CDR-H2
WIYPGNVNTEYNEKFKGK

SEQ ID NO: 46 - protein, 9 aa, Artificial Sequence
  HLA-A*02 CDR-H3
EEITYAMDY

SEQ ID NO: 47 - protein, 16 aa, Artificial Sequence
  HLA-A*02 CDR-L1
RSSQSIVHSNGNTYLD

SEQ ID NO: 48 - protein, 12 aa, Artificial Sequence
  HLA-A*02 CDR-L2
KVSNRFSGVPDR

SEQ ID NO: 49 - protein, 9 aa, Artificial Sequence
  HLA-A*02 CDR-L3
MQGSHVPRT

SEQ ID NO: 50 - protein, 11 aa, Artificial Sequence
  HLA-A*02 CDR-H1
SGYTFTSYHMH

SEQ ID NO: 51 - protein, 17 aa, Artificial Sequence
  HLA-A*02 CDR-H2
WIYPGDGSTQYNEKFKG

SEQ ID NO: 52 - protein, 9 aa, Artificial Sequence
  HLA-A*02 CDR-H3
EGTYYAMDY

SEQ ID NO: 53 - protein, 247 aa, Artificial Sequence
  HLA-A*02 ScFv
DVLMTQTPLSLPVSLGDQASISCRSSQSIVHSNGNTYLEWYLQKPGQSPKLLIYKVSNRFSGVPDRFSGSGSGTDFTLKISRVEAEDLGVYYCFQGSHVPRTSGGGTKLEIKGGGGSGGGGSGGGGSGGQVQLQQSGPELVKPGASVRISCKASGYTFTSYHIHWVKQRPGQGLEWIGWIYPGNVNTEYNEKFKGKATLTADKSSSTAYMHLSSLTSEDSAVYFCAREEITYAMDYWGQGTSVTVSS

SEQ ID NO: 54 - protein, 247 aa, Artificial Sequence
  HLA-A*02 ScFv
QVQLVQSGAEVKKPGSSVKVSCKASGYTFTSYHIHWVRQAPGQGLEWMGWIYPGNVNTEYNEKFKGKATITADKSTSTAYMELSSLRSEDTAVYYCAREEITYAMDYWGQGTTVTVSSGGGGSGGGGSGGGGSGGEIVLTQSPGTLSLSPGERATLSCRSSQSIVHSNGNTYLEWYQQKPGQAPRLLIYKVSNRFSGIPDRFSGSGSGTDFTLTISRLEPEDFAVYYCFQGSHVPRTFGGGTKVEIK

SEQ ID NO: 55 - protein, 247 aa, Artificial Sequence
  HLA-A*02 ScFv
QVQLVQSGAEVKKPGSSVKVSCKASGYTFTSYHIHWVRQAPGQGLEWMGWIYPGNVNTEYNEKFKGKATITADKSTSTAYMELSSLRSEDTAVYYCAREEITYAMDYWGQGTTVTVSSGGGGSGGGGSGGGGSGGDIVMTQTPLSLPVTPGEPASISCRSSQSIVHSNGNTYLEWYLQKPGQSPQLLIYKVSNRFSGVPDRFSGSGSGTDFTLKISRVEAEDVGVYYCFQGSHVPRTFGGGTKVEIK

SEQ ID NO: 56 - protein, 247 aa, Artificial Sequence
  HLA-A*02 ScFv
EVQLVESGGGLVKPGGSLRLSCAASGYTFTSYHIHWVRQAPGKGLEWVGWIYPGNVNTEYNEKFKGRFTISRDDSKNTLYLQMNSLKTEDTAVYYCAREEITYAMDYWGQGTTVTVSSGGGGSGGGGSGGGGSGGDIQMTQSPSSLSASVGDRVTITCRSSQSIVHSNGNTYLEWYQQKPGKAPKLLIYKVSNRFSGVPSRFSGSGSGTDFTLTISSLQPEDFATYYCFQGSHVPRTFGGGTKVEIK

SEQ ID NO: 57 - protein, 247 aa, Artificial Sequence
  HLA-A*02 ScFv
QVQLVQSGAEVKKPGSSVKVSCKASGYTFTSYHIHWVRQAPGQGLEWIGWIYPGNVNTEYNEKFKGKATITADESTNTAYMELSSLRSEDTAVYYCAREEITYAMDYWGQGTLVTVSSGGGGSGGGGSGGGGSGGDIQMTQSPSTLSASVGDRVTITCRSSQSIVHSNGNTYLEWYQQKPGKAPKLLIYKVSNRFSGVPARFSGSGSGTEFTLTISSLQPDDFATYYCFQGSHVPRTFGQGTKVEVK

SEQ ID NO: 58 - protein, 247 aa, Artificial Sequence
  HLA-A*02 ScFv
QVQLVQSGAEVKKPGSSVKVSCKASGYTFTSYHMHWVRQAPGQGLEWIGYIYPGNVNTEYNEKFKGKATLTADKSTNTAYMELSSLRSEDTAVYFCAREEITYAMDYWGQGTLVTVSSGGGGSGGGGSGGGGSGGDVQMTQSPSTLSASVGDRVTITCSSSQSIVHSNGNTYMEWYQQKPGKAPKLLIYKVSNRFSGVPDRFSGSGSGTEFTLTISSLQPDDFATYYCHQGSHVPRTFGQGTKVEVK

SEQ ID NO: 59 - protein, 247 aa, Artificial Sequence
  HLA-A*02 ScFv
QVQLQQSGPELVKPGASVKMSCKASGYTFTSYHIQWVKQRPGQGLEWIGWIYPGDGSTQYNEKFKGKTTLTADKSSSTAYMLLSSLTSEDSAIYFCAREGTYYAMDYWGQGTSVTVSSGGGGSGGGGSGGGGSGGDVLMTQTPLSLPVSLGDQVSISCRSSQSIVHSNGNTYLEWYLQKPGQSPKLLIYKVSNRFSGVPDRFSGSGSGTDFTLKISRVEAEDLGVYYCFQGSHVPRTFGGGTKLEIK

SEQ ID NO: 60 - protein, 247 aa, Artificial Sequence
  HLA-A*02 ScFv
QLQLQESGPGLVKPSETLSLTCTVSGYTFTSYHIQWIRQPPGKGLEWIGWIYPGDGSTQYNEKFKGRATISVDTSKNQFSLNLDSVSAADTAIYYCAREGTYYAMDYWGKGSTVTVSSGGGGSGGGGSGGGGSGGDIQMTQSPSSLSASVGDRVTITCRSSQSIVHSNGNTYLEWYQQKPGKAPKLLIYKVSNRFSGVPSRFSGSGSGTDFTFTISSLQPEDIATYYCFQGSHVPRTFGPGTKVDIK

SEQ ID NO: 61 - protein, 247 aa, Artificial Sequence
  HLA-A*02 ScFv
EVQLVQSGAELKKPGSSVKVSCKASGYTFTSYHIQWVKQAPGQGLEWIGWIYPGDGSTQYNEKFKGKATLTVDKSTNTAYMELSSLRSEDTAVYYCAREGTYYAMDYWGQGTLVTVSSGGGGSGGGGSGGGGSGGDIQMTQSPSTLSASVGDRVTITCRSSQSIVHSNGNTYLEWYQQKPGKAPKLLIYKVSNRFSGVPSRFSGSGSGTDFTLTISSLQPDDFATYYCFQGSHVPRTFGQGTKVEVK

SEQ ID NO: 62 - protein, 247 aa, Artificial Sequence
  HLA-A*02 ScFv
QVQLVQSGAEVKKPGSSVKVSCKASGYTFTSYHIQWVRQAPGQGLEWMGWIYPGDGSTQYNEKFKGRVTITADKSTSTAYMELSSLRSEDTAVYYCAREGTYYAMDYWGQGTTVTVSSGGGGSGGGGSGGGGSGGEIVLTQSPGTLSLSPGERATLSCRSSQSIVHSNGNTYLEWYQQKPGQAPRLLIYKVSNRFSGIPDRFSGSGSGTDFTLTISRLEPEDFAVYYCFQGSHVPRTFGGGTKVEIK

SEQ ID NO: 63 - protein, 247 aa, Artificial Sequence
  HLA-A*02 ScFv
QVTLKQSGAEVKKPGSSVKVSCTASGYTFTSYHVSWVRQAPGQGLEWLGRIYPGDGSTQYNEKFKGKVTITADKSMDTSFMELTSLTSEDTAVYYCAREGTYYAMDLWGQGTLVTVSSGGGGSGGGGSGGGGSGGEIVLTQSPGTLSLSPGERATLSCRSSQSIVHSNGNTYLAWYQQKPGQAPRLLISKVSNRFSGVPDRFSGSGSGTDFTLTISRLEPEDFAVYYCQQGSHVPRTFGGGTKVEIK

SEQ ID NO: 64 - protein, 247 aa, Artificial Sequence
  HLA-A*02 ScFv
QVQLVQSGAEVKKPGASVKVSCKASGYTFTSYHMHWVRQAPGQRLEWMGWIYPGDGSTQYNEKFKGKVTITRDTSASTAYMELSSLRSEDTAVYYCAREGTYYAMDYWGQGTLVTVSSGGGGSGGGGSGGGGSGGDIVMTQTPLSLPVTPGEPASISCRSSQSIVHSNGNTYLDWYLQKPGQSPQLLIYKVSNRFSGVPDRFSGSGSGTDFTLKISRVEAEDVGVYYCMQGSHVPRTFGGGTKVEIK

SEQ ID NO: 65 - protein, 650 aa, Homo sapiens
MTPILTVLICLGLSLGPRTHVQAGHLPKPTLWAEPGSVITQGSPVTLRCQGGQETQEYRLYREKKTALWITRIPQELVKKGQFPIPSITWEHAGRYRCYYGSDTAGRSESSDPLELVVTGAYIKPTLSAQPSPVVNSGGNVILQCDSQVAFDGFSLCKEGEDEHPQCLNSQPHARGSSRAIFSVGPVSPSRRWWYRCYAYDSNSPYEWSLPSDLLELLVLGVSKKPSLSVQPGPIVAPEETLTLQCGSDAGYNRFVLYKDGERDFLQLAGAQPQAGLSQANFTLGPVSRSYGGQYRCYGAHNLSSEWSAPSDPLDILIAGQFYDRVSLSVQPGPTVASGENVTLLCQSQGWMQTFLLTKEGAADDPWRLRSTYQSQKYQAEFPMGPVTSAHAGTYRCYGSQSSKPYLLTHPSDPLELVVSGPSGGPSSPTTGPTSTSGPEDQPLTPTGSDPQSGLGRHLGVVIGILVAVILLLLLLLLLFLILRHRRQGKHWTSTQRKADFQHPAGAVGPEPTDRGLQWRSSPAADAQEENLYAAVKHTQPEDGVEMDTRSPHDEDPQAVTYAEVKHSRPRREMASPPSPLSGEFLDTKDRQAEEDRQMDTEAAASEAPQDVTYAQLHSLTLRREATEPPPSQEGPSPAVPSIYATLAIH

SEQ ID NO: 66 - DNA, 3229 bp, Homo sapiens
aaatgagttttaaaaaggcttgtccaggaagcacatatgggagctggtcactctgcattttgggccctcctggaggtgtttagaccttccgagagagaaactgagacacatgagagggaagaaatgactcagtggtgagaccctgtggagtcccacccacaaccagcacactgtgacccactgcacaaacctctagcccacagctcacttcctcctttaagaagagaagagaaaagaggagaggagaggaggaacagaaaagaaaagaaaagaaaaagtgggaaacaaataatctaagaatgaggagaaagcaagaagagtgacccccttgtgggcactccattggttttatggcgcctctactttctggagtttgtgtaaaacaaaaatattatggtctttgtgcacatttacatcaagctcagcctgggcggcacagccagatgcgagatgcgtctctgctgatctgagtctgcctgcagcatggacctgggtcttccctgaagcatctccagggctggagggacgactgccatgcaccgagggctcatccatccacagagcagggcagtgggaggagacgccatgacccccatcctcacggtcctgatctgtctcgggctgagtctgggcccccggacccacgtgcaggcagggcacctccccaagcccaccctctgggctgaaccaggctctgtgatcacccaggggagtcctgtgaccctcaggtgtcaggggggccaggagacccaggagtaccgtctatatagagaaaagaaaacagcaccctggattacacggatcccacaggagcttgtgaagaagggccagttccccatcccatccatcacctgggaacacacagggcggtatcgctgttactatggtagcgacactgcaggccgctcagagagcagtgaccccctggagctggtggtgacaggagcctacatcaaacccaccctctcagcccagcccagccccgtggtgaactcaggagggaatgtaaccctccagtgtgactcacaggtggcatttgatggcttcattctgtgtaaggaaggagaagatgaacacccacaatgcctgaactcccagccccatgcccgtgggtcgtcccgcgccatcttctccgtgggccccgtgagcccgagtcgcaggtggtggtacaggtgctatgcttatgactcgaactctccctatgagtggtctctacccagtgatctcctggagctcctggtcctaggtgtttctaagaagccatcactctcagtgcagccaggtcctatcgtggcccctgaggagaccctgactctgcagtgtggctctgatgctggctacaacagatttgttctgtataaggacggggaacgtgacttccttcagctcgctggcgcacagccccaggctgggctctcccaggccaacttcaccctgggccctgtgagccgctcctacgggggccagtacagatgctacggtgcacacaacctctcctccgagtggtcggcccccagcgaccccctggacatcctgatcgcaggacagttctatgacagagtctccctctcggtgcagccgggccccacggtggcctcaggagagaacgtgaccctgctgtgtcagtcacagggatggatgcaaactttccttctgaccaaggagggggcagctgatgacccatggcgtctaagatcaacgtaccaatctcaaaaataccaggctgaattccccatgggtcctgtgacctcagcccatgcggggacctacaggtgctacggctcacagagctccaaaccctacctgctgactcaccccagtgaccccctggagctcgtggtctcaggaccgtctgggggccccagctccccgacaacaggccccacctccacatctggccctgaggaccagcccctcacccccaccgggtcggatccccagagtggtctgggaaggcacctgggggttgtgatcggcatcttggtggccgtcatcctactgctcctcctcctcctcctcctcttcctcatcctccgacatcgacgtcagggcaaacactggacatcgacccagagaaaggctgatttccaacatcctgcaggggctgtggggccagagcccacagacagaggcctgcagtggaggtccagcccagctgccgatgcccaggaagaaaacctctatgctgccgtgaagcacacacagcctgaggatggggtggagatggacactcggagcccacacgatgaagacccccaggcagtgacgtatgccgaggtgaaacactccagacctaggagagaaatggcctctcctccttccccactgtctggggaattcctggacacaaaggacagacaggcggaagaggacaggcagatggacactgaggctgctgcatctgaagccccccaggatgtgacctacgcccagctgcacagcttgaccctcagacgggaggcaactgagcctcctccatcccaggaagggccctctccagctgtgcccagcatctacgccactctggccatccactagcccagggggggacgcagaccccacactccatggagtctggaatgcatgggagctgcccccccagtggacaccattggaccccacccagcctggatctaccccaggagactctgggaacttttaggggtcactcaattctgcagtataaataactaatgtctctacaattttgaaataaagcaacagacttctcaataatcaatgaagtagctgagaaaactaagtcagaaagtgcattaaactgaatcacaatgtaaatattacacatcaagcgatgaaactggaaaactacaagccacgaatgaatgaattaggaaagaaaaaaagtaggaaatgaatgatcttggctttcctataagaaatttagggcagggcacggtggctcacgcctgtaattccagcactttgggaggccgaggcgggcagatcacgagttcaggagatcgagaccatcttggccaacatggtgaaaccctgtctctcctaaaaatacaaaaattagctggatgtggtggcagtgcctgtaatcccagctatttgggaggctgaggcaggagaatcgcttgaaccagggagtcagaggtttcagtgagccaagatcgcaccactgctctccagcctggcgacagagggagactccatctcaaattaaaaaaaaaaaaaaaaaagaaagaaaaaaaaaaaaaaaaaa

SEQ ID NO: 67 - protein, 6 aa, Artificial Sequence
  ITIM
NLYAAV

SEQ ID NO: 68 - protein, 6 aa, Artificial Sequence
  ITIM
VTYAEV

SEQ ID NO: 69 - protein, 6 aa, Artificial Sequence
  ITIM
VTYAQL

SEQ ID NO: 70 - protein, 6 aa, Artificial Sequence
  ITIM
SIYATL

SEQ ID NO: 71 - protein, 35 aa, Artificial Sequence
  ITIM 1-2
NLYAAVKHTQPEDGVEMDTRSPHDEDPQAVTYAEV

SEQ ID NO: 72 - protein, 58 aa, Artificial Sequence
  ITIM 2-3
VTYAEVKHSRPRREMASPPSPLSGEFLDTKDRQAEEDRQMDTEAAASEAPQDVTYAQL

SEQ ID NO: 73 - protein, 36 aa, Artificial Sequence
  ITIM 3-4
VTYAQLHSLTLRREATEPPPSQEGPSPAVPSIYATL

SEQ ID NO: 74 - protein, 87 aa, Artificial Sequence
  ITIM 1-3
NLYAAVKHTQPEDGVEMDTRSPHDEDPQAVTYAEVKHSRPRREMASPPSPLSGEFLDTKDRQAEEDRQMDTEAAASEAPQDVTYAQL

SEQ ID NO: 75 - protein, 88 aa, Artificial Sequence
  ITIM 2-4
VTYAEVKHSRPRREMASPPSPLSGEFLDTKDRQAEEDRQMDTEAAASEAPQDVTYAQLHSLTLRREATEPPPSQEGPSPAVPSIYATL

SEQ ID NO: 76 - protein, 117 aa, Artificial Sequence
  ITIM 1-4
NLYAAVKHTQPEDGVEMDTRSPHDEDPQAVTYAEVKHSRPRREMASPPSPLSGEFLDTKDRQAEEDRQMDTEAAASEAPQDVTYAQLHSLTLRREATEPPPSQEGPSPAVPSIYATL

SEQ ID NO: 77 - protein, 20 aa, Artificial Sequence
  D3D4 domain
YGSQSSKPYLLTHPSDPLEL

SEQ ID NO: 78 - protein, 43 aa, Artificial Sequence
  short hinge
VVSGPSGGPSSPTTGPTSTSGPEDQPLTPTGSDPQSGLGRHLG

SEQ ID NO: 79 - protein, 86 aa, Artificial Sequence
  hinge- transmembrane
YGSQSSKPYLLTHPSDPLELVVSGPSGGPSSPTTGPTSTSGPEDQPLTPTGSDPQSGLGRHLGVVIGILVAVILLLLLLLLLFLIL

SEQ ID NO: 80 - protein, 190 aa, Artificial Sequence
  hinge-transmembrane-intracellular domain
VVIGILVAVILLLLLLLLLFLILRHRRQGKHWTSTQRKADFQHPAGAVGPEPTDRGLQWRSSPAADAQEENLYAAVKHTQPEDGVEMDTRSPHDEDPQAVTYAEVKHSRPRREMASPPSPLSGEFLDTKDRQAEEDRQMDTEAAASEAPQDVTYAQLHSLTLRREATEPPPSQEGPSPAVPSIYATLAIH

SEQ ID NO: 81 - protein, 167 aa, Artificial Sequence
  LILRB1 intracellular domain
RHRRQGKHWTSTQRKADFQHPAGAVGPEPTDRGLQWRSSPAADAQEENLYAAVKHTQPEDGVEMDTRSPHDEDPQAVTYAEVKHSRPRREMASPPSPLSGEFLDTKDRQAEEDRQMDTEAAASEAPQDVTYAQLHSLTLRREATEPPPSQEGPSPAVPSIYATLAIH

SEQ ID NO: 82 - protein, 253 aa, Artificial Sequence
  LILRB1 hinge-transmemebrane-intracellular domain
YGSQSSKPYLLTHPSDPLELVVSGPSGGPSSPTTGPTSTSGPEDQPLTPTGSDPQSGLGRHLGVVIGILVAVILLLLLLLLLFLILRHRRQGKHWTSTQRKADFQHPAGAVGPEPTDRGLQWRSSPAADAQEENLYAAVKHTQPEDGVEMDTRSPHDEDPQAVTYAEVKHSRPRREMASPPSPLSGEFLDTKDRQAEEDRQMDTEAAASEAPQDVTYAQLHSLTLRREATEPPPSQEGPSPAVPSIYATLAIH

SEQ ID NO: 83 - protein, 233 aa, Artificial Sequence
  LILRB1 hinge-TM-intracellular domain
VVSGPSGGPSSPTTGPTSTSGPEDQPLTPTGSDPQSGLGRHLGVVIGILVAVILLLLLLLLLFLILRHRRQGKHWTSTQRKADFQHPAGAVGPEPTDRGLQWRSSPAADAQEENLYAAVKHTQPEDGVEMDTRSPHDEDPQAVTYAEVKHSRPRREMASPPSPLSGEFLDTKDRQAEEDRQMDTEAAASEAPQDVTYAQLHSLTLRREATEPPPSQEGPSPAVPSIYATLAIH

SEQ ID NO: 84 - protein, 63 aa, Artificial Sequence
  LILRB1 hinge domain
YGSQSSKPYLLTHPSDPLELVVSGPSGGPSSPTTGPTSTSGPEDQPLTPTGSDPQSGLGRHLG

SEQ ID NO: 85 - protein, 23 aa, Artificial Sequence
  LILRB1 transmembrane domain
VVIGILVAVILLLLLLLLLFLIL

SEQ ID NO: 86 - protein, 237 aa, Artificial Sequence
  MSLN binding domain
QVQLVQSGAEVEKPGASVKVSCKASGYTFTDYYMHWVRQAPGQGLEWMGWINPNSGGTNYAQKFQGRVTMTRDTSISTAYMELSRLRSDDTAVYYCASGWDFDYWGQGTLVTVSSGGGGSGGGGSGGGGSGGDIVMTQSSSLSASVGDRVTITCRASQSIRYYLSWYQQKPGKAPKLLIYTASILQNGVPSRFSGSGSGTDFTLTISSLQPEDFATYYCLQTYTTPDFGPGTKVEIK

SEQ ID NO: 87 - DNA, 711 bp, Artificial Sequence
  MSLN binding domain
caggtgcagctggtgcagtctggggctgaggtggagaagcctggggcctcagtgaaggtctcctgcaaggcttctggatacaccttcaccgactactatatgcactgggtgcgacaggcccctggacaagggcttgagtggatgggatggatcaaccctaacagtggtggcacaaactatgcacagaagtttcagggcagggtcaccatgaccagggacacgtccatcagcacagcctacatggagctgagcaggctgagatctgacgacacggccgtgtattactgtgcgtctggctgggactttgactactggggccagggaaccctggtcaccgtgtcctcaggcggaggtggaagcggagggggaggatctggcggcggaggaagcggaggcgacatcgtgatgacccagtcttcctccctgtctgcatctgtcggagacagagtcaccatcacttgccgggccagtcagagcattaggtactatttaagttggtatcagcagaaaccaggaaaagcccctaagctcctgatctatactgcatccattttacaaaatggggtcccatcaaggttcagtggcagtggatctgggacagatttcactctcaccatcagcagcctgcaacctgaggattttgcaacttattactgcctccagacttacactactccggactttggcccagggaccaaggtggaaatcaaa

SEQ ID NO: 88 - protein, 246 aa, Artificial Sequence
  MSLN binding domain
QVQLVQSGAEVRAPGASVKISCKASGFTFRGYYIHWVRQAPGQGLEWMGIINPSGGSRAYAQKFQGRVTMTRDTSTSTVYMELSSLRSDDTAMYYCARTASCGGDCYYLDYWGQGTLVTVSSGGGGSGGGGSGGGGSGGDIQMTQSPPTLSASVGDRVTITCRASENVNIWLAWYQQKPGKAPKLLIYKSSSLASGVPSRFSGSGSGAEFTLTISSLQPDDFATYYCQQYQSYPLTFGGGTKVEIK

SEQ ID NO: 89 - DNA, 738 bp, Artificial Sequence
  MSLN binding domain
caggtgcagctggtgcagtctggggctgaggtgagggcacctggggcctcagtgaagatttcctgcaaggcttctggattcaccttcagaggctactatatccactgggtgcgacaggcccctggacaagggcttgagtggatgggaatcatcaaccctagtggtggtagcagagcctacgcacagaagttccagggcagggtcaccatgaccagggacacttccacgagcacagtctacatggagctgagcagcctgagatctgacgacacggccatgtattactgtgcgagaaccgcaagttgtggtggtgactgctactaccttgactactggggccagggaaccctggtcaccgtgtcctcaggcggaggtggaagcggagggggaggatctggcggcggaggaagcggaggcgacatccagatgacccagtctcctcccaccctgtctgcatctgtaggagacagagtcaccatcacttgccgggccagtgagaatgttaatatctggttggcctggtatcagcagaaaccagggaaagcccctaagctcctgatctataagtcatccagtttagcaagtggggtcccatcaaggttcagtggcagtggatctggggcagaattcactctcaccatcagcagcctgcagcctgatgattttgcaacttattactgccaacagtatcaaagttaccccctcactttcggcggagggaccaaggtggaaatcaaa

SEQ ID NO: 90 - protein, 242 aa, Artificial Sequence
  MSLN binding domain
QVQLVQSGAEVKKPGASVKVSCKASGYSFTGYTMNWVRQAPGQRLEWMGLITPYNGASSYNQKFRGRVTITRDTSASTAYMELSSLRSEDTAVYYCARGGYDGRGFDYWGQGTTVTVSSGGGGSGGGGSGGGGSGGDIQMTQSPSSLSASVGDRVTITCSASSSVSYMHWYQQKPGKAPKRLIYDTSKLASGVPSRFSGSGSGTEFTLTISSLQPEDFATYYCQQWSGYPLTFGQGTKLEIK

SEQ ID NO: 91 - DNA, 726 bp, Artificial Sequence
  MSLN binding domain
caggtgcagctggtgcagtctggggctgaggtgaagaagcctggggcctcagtgaaggtttcctgcaaggcttctggatactcattcaccggctacaccatgaactgggtgaggcaggcccctggacaaagacttgagtggatgggacttatcaccccttacaatggtgcttctagctacaaccagaagttcaggggcagggtcacaatcactagagacacgtcagccagcacagcctacatggagctctccagcctgagatctgaagacactgcagtctattactgtgcaagggggggttacgacgggaggggttttgactactggggccagggaaccacggtcaccgtgtcctcaggcggaggtggaagcggagggggaggatctggcggcggaggaagcggaggcgacatccagatgacccagtctccttcaagcttgtctgcatctgtaggagacagggtcaccatcacttgcagtgccagctcaagtgtaagttacatgcactggtatcagcagaaaccaggcaaggcccctaagagattgatctatgacacatccaaattagcaagtggggtcccaagtcgcttcagtggcagtggatctgggaccgaattcactctcaccatcagcagcttgcagcctgaggattttgcaacttattactgccagcagtggagtggttaccctctcacgttcggtcaggggacaaagttggaaatcaaa

SEQ ID NO: 92 - protein, 242 aa, Artificial Sequence
  MSLN binding domain
QVQLQQSGPELEKPGASVKISCKASGYSFTGYTMNWVKQSHGKSLEWIGLITPYNGASSYNQKFRGKATLTVDKSSSTAYMDLLSLTSEDSAVYFCARGGYDGRGFDYWGQGTTVTVSSGGGGSGGGGSGGGGSGGDIELTQSPAIMSASPGEKVTMTCSASSSVSYMHWYQQKSGTSPKRWIYDTSKLASGVPGRFSGSGSGNSYSLTISSVEAEDDATYYCQQWSGYPLTFGAGTKLEIK

SEQ ID NO: 93 - DNA, 726 bp, Artificial Sequence
  MSLN binding domain
caggtgcagctgcagcagtctgggcctgagctggagaagcctggggcctcagtgaagatttcctgcaaggcttctggatactcattcaccggctacaccatgaactgggtgaagcagagccatggaaaaagccttgagtggattggacttatcaccccttacaatggtgcttctagctacaaccagaagttcaggggcaaggccacattaactgtagacaagtcatccagcacagcctacatggacctcctcagcctgacatctgaagactctgcagtctatttctgtgcaagggggggttacgacgggaggggttttgactactggggccagggaaccacggtcaccgtgtcctcaggcggaggtggaagcggagggggaggatctggcggcggaggaagcggaggcgacatcgagctcacccagtctcctgcaatcatgtctgcatctccaggagagaaggtcaccatgacttgcagtgccagctcaagtgtaagttacatgcactggtatcagcagaaatcaggcacctcccctaagagatggatctatgacacatccaaattggcaagtggggtcccaggtcgcttcagtggcagtggatctgggaactcttactctctcaccatcagcagcgtggaggctgaggatgatgcaacttattactgccagcagtggagtggttaccctctcacgttcggtgctgggacaaagttggaaatcaaa

SEQ ID NO: 94 - protein, 243 aa, Artificial Sequence
  CEA binding domain
QVQLQQSGAELVRSGTSVKLSCTASGFNIKDSYMHWLRQGPEQGLEWIGWIDPENGDTEYAPKFQGKATFTTDTSSNTAYLQLSSLTSEDTAVYYCNEGTPTGPYYFDYWGQGTTVTVSSGGGGSGGGGSGGGGSGGENVLTQSPAIMSASPGEKVTITCSASSSVSYMHWFQQKPGTSPKLWIYSTSNLASGVPARFSGSGSGTSYSLTISRMEAEDAATYYCQQRSSYPLTFGAGTKLELK

SEQ ID NO: 95 - DNA, 729 bp, Artificial Sequence
  CEA binding domain
caggtccagctgcagcagtctggggcagagcttgtgaggtcagggacctcagtcaagttgtcctgcacagcttctggcttcaacattaaagactcctatatgcactggttgaggcaggggcctgaacagggcctggagtggattggatggattgatcctgagaatggtgatactgaatatgccccgaagttccagggcaaggccacttttactacagacacatcctccaacacagcctacctgcagctcagcagcctgacatctgaggacactgccgtctattactgtaatgaagggacaccgacagggccatactattttgactactggggtcaaggaaccacagtcaccgtgtcctcaggcggaggtggaagcggagggggaggatctggcggcggaggaagcggaggcgagaacgttctcacccagtctccagcaatcatgtctgcatctccaggggagaaggtcaccataacctgcagtgccagctcaagtgtaagttacatgcactggttccagcagaagccaggcacttctcccaaactctggatttatagcacatccaacctggcttctggagtccctgctcgcttcagtggcagtggatctgggacctcttactctctcacaatcagccgaatggaggctgaagatgctgccacttattactgccagcaaaggagtagttacccgctcacgttcggtgctgggaccaagctggagctgaaa

SEQ ID NO: 96 - protein, 243 aa, Artificial Sequence
  CEA binding domain
QVQLVQSGAEVKKPGASVKVSCKASGFNIKDSYMHWVRQAPGQGLEWMGWIDPENGDTEYAPKFQGRVTMTTDTSTSTAYMELRSLRSDDTAVYYCNEGTPTGPYYFDYWGQGTTVTVSSGGGGSGGGGSGGGGSGGEIVLTQSPATLSLSPGERATLSCSASSSVSYMHWYQQKPGLAPRLLIYSTSNLASGIPDRFSGSGSGTDFTLTISRLEPEDFAVYYCQQRSSYPLTFGQGTKLEIK

SEQ ID NO: 97 - DNA, 729 bp, Artificial Sequence
  CEA binding domain
caggtccagctggtgcagtctggggcagaggtgaagaaaccaggggcctcagtcaaggtgtcctgcaaagcttctggcttcaacattaaagactcctatatgcactgggtgaggcaggcgcctggacagggcctggagtggatgggatggattgatcctgagaatggtgatactgaatatgccccgaagttccagggcagggtcactatgactacagacacatccacctccacagcctacatggagctcaggagcctgagatctgacgacactgccgtctattactgtaatgaagggacaccgacagggccatactattttgactactggggtcaaggaaccacagtcaccgtgtcctcaggcggaggtggaagcggagggggaggatctggcggcggaggaagcggaggcgagatcgttctcacccagtctccagcaaccttgtctctgtctccaggggagagggccaccctaagctgcagtgccagctcaagtgtaagttacatgcactggtaccagcagaagccaggccttgctcccagactcctgatttatagcacatccaacctggcttctggaatccctgatcgcttcagtggcagtggatctgggaccgatttcactctcacaatcagccgactggagcctgaagatttcgccgtttattactgccagcaaaggagtagttacccgctcacgttcggtcaggggaccaagctggagatcaaa

SEQ ID NO: 98 - protein, 243 aa, Artificial Sequence
  CEA binding domain
EVQLAESGGGLVQPGGSLRLSCAASGFTFSSDAMSWVRQAPGKGLEWVSAISGSGGSTYYADSVKGRFTISRDNSKNTLYLQMNSLRAEDTAVYYCAKSNEFLFDYWGQGTLVTVSSGGGGSGGGGSGGGGSGGSSELTQDPAVSVALGQTVRITCQGDSLRSSYASWYRQRPGQAPVLVIYGKNNRPSGIPDRFSGSSSGNTASLTITGAQAEDEADYYWNSSYAWLPYVVFGGGTKLTVLG

SEQ ID NO: 99 - DNA, 729 bp, Artificial Sequence
  CEA binding domain
gaggtgcagctggcggagtctgggggaggcttggtacagcctggggggtccctgagactctcctgtgcagcctctggattcacctttagcagcgatgccatgagctgggtccgccaggctccagggaaggggctggagtgggtctcagctattagtggtagtggtggtagcacatactacgcagactccgtgaagggccggttcaccatctccagagacaattccaagaacacgctgtatctgcaaatgaacagcctgagagccgaggacacggccgtgtattactgtgcaaagtctaatgagtttctttttgactactggggccaaggtaccctggtcaccgtgtcgagtggcggaggtggaagcggagggggaggatctggcggcggaggaagcggaggctcttctgagctgactcaggaccctgctgtgtctgtggccttgggacagacagtcaggatcacatgccaaggagacagcctcagaagctcttatgcaagctggtaccggcagaggccaggacaggcccctgtacttgtcatctatggtaaaaacaaccggccctcagggatcccagaccgattctctggctccagctcaggaaacacagcttccttgaccatcactggggctcaggcggaagatgaggctgactattactggaactccagctacgcttggctgccctacgtggtattcggcggagggaccaagctgaccgtcctaggt

SEQ ID NO: 100 - protein, 243 aa, Artificial Sequence
  CEA binding domain
QVQLEQSGAGVVKPGASVKLSCKASGFNIKDSYMHWLRQGPGQRLEWIGWIDPENGDTEYAPKFQGKATFTTDTSANTAYLGLSSLRPEDTAVYYCNEGTPTGPYYFDYWGQGTLVTVSSGGGGSGGGGSGGGGSGGENVLTQSPSSMSVSVGDRVNIACSASSSVPYMHWLQQKPGKSPKLLIYLTSNLASGVPSRFSGSGSGTDYSLTISSVQPEDAATYYCQQRSSYPLTFGGGTKLEIK

SEQ ID NO: 101 - DNA, 729 bp, Artificial Sequence
  CEA binding domain
caggtccagctggagcagtctggggcaggggttgtgaagccaggggcctcagtcaagttgtcctgcaaagcttctggcttcaacattaaagactcctatatgcactggttgaggcaggggcctggacagcgcctggagtggattggatggattgatcctgagaatggtgatactgaatatgccccgaagttccagggcaaggccacttttactacagacacatccgccaacacagcctacctggggctcagcagcctgagacctgaggacactgccgtctattactgtaatgaagggacaccgacagggccatactattttgactactggggtcaaggaaccctagtcaccgtgtcctcaggcggaggtggaagcggagggggaggatctggcggcggaggaagcggaggcgagaacgttctcacccagtctccaagctctatgtctgtatctgtcggggacagggtcaacatcgcctgcagtgccagctcaagtgtaccttacatgcactggctccagcagaagccaggcaaatctcccaaactcctgatttatctcacatccaacctggcttctggagtccctagccgcttcagtggcagtggatctgggaccgattactctctcacaatcagctcagtgcagcctgaagatgctgccacttattactgccagcaaaggagtagttacccgctcacgttcggtggtgggaccaagctggagatcaaa

SEQ ID NO: 102 - protein, 249 aa, Artificial Sequence
  EGFR ScFv
QVQLVESGGGVVQPGRSLRLSCAASGFTFSTYGMHWVRQAPGKGLEWVAVIWDDGSYKYYGDSVKGRFTISRDNSKNTLYLQMNSLRAEDTAVYYCARDGITMVRGVMKDYFDYWGQGTLVTVSSGGGGSGGGGSGGGGSGGAIQLTQSPSSLSASVGDRVTITCRASQDISSALVWYQQKPGKAPKLLIYDASSLESGVPSRFSGSESGTDFTLTISSLQPEDFATYYCQQFNSYPLTFGGGTKVEIK

SEQ ID NO: 103 - DNA, 747 bp, Artificial Sequence
  EGFR ScFv
caggtgcagctggtggagtctgggggaggcgtggtccagcctgggaggtccctgagactctcctgtgcagcgtctggattcaccttcagtacctatggcatgcactgggtccgccaggctccaggcaaggggctggagtgggtggcagttatatgggatgatggaagttataaatactatggagactccgtgaagggccgattcaccatctccagagacaattccaagaacacgctgtatctgcaaatgaacagcctgagagccgaggacacggctgtgtattactgtgcgagagatggtattactatggttcggggagttatgaaggactactttgactactggggccagggaaccctggtcaccgtctcctcaggcggaggtggaagcggagggggaggatctggcggcggaggaagcggaggcgccatccagttgacccagtctccatcctccctgtctgcatctgtaggagacagagtcaccatcacttgccgggcaagtcaggacattagcagtgctttagtctggtatcagcagaaaccagggaaagctcctaagctcctgatctatgatgcctccagtttggaaagtggggtcccatcaaggttcagcggcagtgaatctgggacagatttcactctcaccatcagcagcctgcagcctgaagattttgcaacttattactgtcaacagtttaatagttacccgctcactttcggcggagggaccaaggtggagatcaaa

SEQ ID NO: 104 - protein, 249 aa, Artificial Sequence
  EGFR ScFv
AIQLTQSPSSLSASVGDRVTITCRASQDISSALVWYQQKPGKAPKLLIYDASSLESGVPSRFSGSESGTDFTLTISSLQPEDFATYYCQQFNSYPLTFGGGTKVEIKGGGGSGGGGSGGGGSGGQVQLVESGGGVVQPGRSLRLSCAASGFTFSTYGMHWVRQAPGKGLEWVAVIWDDGSYKYYGDSVKGRFTISRDNSKNTLYLQMNSLRAEDTAVYYCARDGITMVRGVMKDYFDYWGQGTLVTVSS

SEQ ID NO: 105 - DNA, 747 bp, Artificial Sequence
  EGFR ScFv
gccatccagttgacccagtctccatcctccctgtctgcatctgtaggagacagagtcaccatcacttgccgggcaagtcaggacattagcagtgctttagtctggtatcagcagaaaccagggaaagctcctaagctcctgatctatgatgcctccagtttggaaagtggggtcccatcaaggttcagcggcagtgaatctgggacagatttcactctcaccatcagcagcctgcagcctgaagattttgcaacttattactgtcaacagtttaatagttacccgctcactttcggcggagggaccaaggtggagatcaaaggcggaggtggaagcggagggggaggatctggcggcggaggaagcggaggccaggtgcagctggtggagtctgggggaggcgtggtccagcctgggaggtccctgagactctcctgtgcagcgtctggattcaccttcagtacctatggcatgcactgggtccgccaggctccaggcaaggggctggagtgggtggcagttatatgggatgatggaagttataaatactatggagactccgtgaagggccgattcaccatctccagagacaattccaagaacacgctgtatctgcaaatgaacagcctgagagccgaggacacggctgtgtattactgtgcgagagatggtattactatggttcggggagttatgaaggactactttgactactggggccagggaaccctggtcaccgtctcctca

SEQ ID NO: 106 - protein, 247 aa, Artificial Sequence
  EGFR ScFv
QIQLVQSGPELKKPGETVKISCKASGYTFTEYPIHWVKQAPGKGFKWMGMIYTDIGKPTYAEEFKGRFAFSLETSASTAYLQINNLKNEDTATYFCVRDRYDSLFDYWGQGTTLTVSSGGGGSGGGGSGGGGSGGDVVMTQTPLSLPVSLGDQASISCRSSQSLVHSNGNTYLHWYLQKPGQSPKLLIYKVSNRFSGVPDRFSGSGSGTDFTLKISRVEAEDLGVYFCSQSTHVPWTFGGGTKLEIK

SEQ ID NO: 107 - DNA, 741 bp, Artificial Sequence
  EGFR ScFv
cagatccagttggtgcagtctggacctgagctgaagaagcctggagagacagtcaagatctcctgcaaggcctctgggtataccttcacagaatatccaatacactgggtgaagcaggctccaggaaagggtttcaagtggatgggcatgatatacaccgacattggaaagccaacatatgctgaagagttcaagggacggtttgccttctctttggagacctctgccagcactgcctatttgcagatcaacaacctcaagaatgaggacacggctacatatttctgtgtaagagatcgatatgattccctctttgactactggggccaaggcaccactctcacagtctcctcaggcggaggtggaagcggagggggaggatctggcggcggaggaagcggaggcgatgttgtgatgacccaaactccactctccctgcctgtcagtcttggagatcaagcctccatctcttgcagatctagtcagagccttgtacacagtaatggaaacacctatttacattggtacctgcagaagccaggccagtctccaaagctcctgatctacaaagtttccaaccgattttctggggtcccagacaggttcagtggcagtggatcagggacagatttcacactcaagatcagcagagtggaggctgaggatctgggagtttatttctgctctcaaagtacacatgttccgtggacgttcggtggaggcaccaagctggaaatcaaa

SEQ ID NO: 108 - protein, 247 aa, Artificial Sequence
  EGFR ScFv
DVVMTQTPLSLPVSLGDQASISCRSSQSLVHSNGNTYLHWYLQKPGQSPKLLIYKVSNRFSGVPDRFSGSGSGTDFTLKISRVEAEDLGVYFCSQSTHVPWTFGGGTKLEIKGGGGSGGGGSGGGGSGGQIQLVQSGPELKKPGETVKISCKASGYTFTEYPIHWVKQAPGKGFKWMGMIYTDIGKPTYAEEFKGRFAFSLETSASTAYLQINNLKNEDTATYFCVRDRYDSLFDYWGQGTTLTVSS

SEQ ID NO: 109 - DNA, 741 bp, Artificial Sequence
  EGFR ScFv
gatgttgtgatgacccaaactccactctccctgcctgtcagtcttggagatcaagcctccatctcttgcagatctagtcagagccttgtacacagtaatggaaacacctatttacattggtacctgcagaagccaggccagtctccaaagctcctgatctacaaagtttccaaccgattttctggggtcccagacaggttcagtggcagtggatcagggacagatttcacactcaagatcagcagagtggaggctgaggatctgggagtttatttctgctctcaaagtacacatgttccgtggacgttcggtggaggcaccaagctggaaatcaaaggcggaggtggaagcggagggggaggatctggcggcggaggaagcggaggccagatccagttggtgcagtctggacctgagctgaagaagcctggagagacagtcaagatctcctgcaaggcctctgggtataccttcacagaatatccaatacactgggtgaagcaggctccaggaaagggtttcaagtggatgggcatgatatacaccgacattggaaagccaacatatgctgaagagttcaagggacggtttgccttctctttggagacctctgccagcactgcctatttgcagatcaacaacctcaagaatgaggacacggctacatatttctgtgtaagagatcgatatgattccctctttgactactggggccaaggcaccactctcacagtctcctca

SEQ ID NO: 110 - protein, 249 aa, Artificial Sequence
  EGFR ScFv
EMQLVESGGGFVKPGGSLKLSCAASGFAFSHYDMSWVRQTPKQRLEWVAYIASGGDITYYADTVKGRFTISRDNAQNTLYLQMSSLKSEDTAMFYCSRSSYGNNGDALDFWGQGTSVTVSSGGGGSGGGGSGGGGSGGDVVMTQTPLSLPVSLGDQASISCRSSQSLVHSNGNTYLHWYLQKPGQSPKLLIYKVSNRFSGVPDRFSGSGSGTDFTLKISRVEAEDLGVYFCSQSTHVLTFGSGTKLEIK

SEQ ID NO: 111 - DNA, 747 bp, Artificial Sequence
  EGFR ScFv
gaaatgcagctggtggagtctgggggaggcttcgtgaagcctggagggtccctgaaactctcatgtgcagcctctggattcgctttcagtcactatgacatgtcttgggttcgccagactccgaagcagaggctggagtgggtcgcatacattgctagtggtggtgatatcacctactatgcagacactgtgaagggccgattcaccatctccagagacaatgcccagaacaccctgtacctgcaaatgagcagtctgaagtctgaggacacagccatgttttactgttcacgatcctcctatggtaacaacggagatgccctggacttctggggtcaaggtacctcagtcaccgtctcctcaggcggaggtggaagcggagggggaggatctggcggcggaggaagcggaggcgatgttgtgatgacccaaactccactctccctgcctgtcagtcttggagatcaagcctccatctcttgcagatctagtcagagccttgttcacagtaatggaaacacctatttacattggtacctgcagaagccaggccagtctccaaagctcctgatctacaaagtttccaaccgattttctggggtcccagacaggttcagtggcagtggatcagggacagatttcacactcaagatcagcagagtggaggctgaggatctgggagtttatttctgctctcaaagtacacatgttctcacgttcggctcggggacaaagttggaaataaaa

SEQ ID NO: 112 - protein, 249 aa, Artificial Sequence
  EGFR ScFv
DVVMTQTPLSLPVSLGDQASISCRSSQSLVHSNGNTYLHWYLQKPGQSPKLLIYKVSNRFSGVPDRFSGSGSGTDFTLKISRVEAEDLGVYFCSQSTHVLTFGSGTKLEIKGGGGSGGGGSGGGGSGGEMQLVESGGGFVKPGGSLKLSCAASGFAFSHYDMSWVRQTPKQRLEWVAYIASGGDITYYADTVKGRFTISRDNAQNTLYLQMSSLKSEDTAMFYCSRSSYGNNGDALDFWGQGTSVTVSS

SEQ ID NO: 113 - DNA, 747 bp, Artificial Sequence
  EGFR ScFv
gatgttgtgatgacccaaactccactctccctgcctgtcagtcttggagatcaagcctccatctcttgcagatctagtcagagccttgttcacagtaatggaaacacctatttacattggtacctgcagaagccaggccagtctccaaagctcctgatctacaaagtttccaaccgattttctggggtcccagacaggttcagtggcagtggatcagggacagatttcacactcaagatcagcagagtggaggctgaggatctgggagtttatttctgctctcaaagtacacatgttctcacgttcggctcggggacaaagttggaaataaaaggcggaggtggaagcggagggggaggatctggcggcggaggaagcggaggcgaaatgcagctggtggagtctgggggaggcttcgtgaagcctggagggtccctgaaactctcatgtgcagcctctggattcgctttcagtcactatgacatgtcttgggttcgccagactccgaagcagaggctggagtgggtcgcatacattgctagtggtggtgatatcacctactatgcagacactgtgaagggccgattcaccatctccagagacaatgcccagaacaccctgtacctgcaaatgagcagtctgaagtctgaggacacagccatgttttactgttcacgatcctcctatggtaacaacggagatgccctggacttctggggtcaaggtacctcagtcaccgtctcctca

SEQ ID NO: 114 - protein, 243 aa, Artificial Sequence
  EGFR ScFv
QVQLKQSGPGLVQPSQSLSITCTVSGFSLTNYGVHWVRQSPGKGLEWLGVIWSGGNTDYNTPFTSRLSINKDNSKSQVFFKMNSLQSNDTAIYYCARALTYYDYEFAYWGQGTLVTVSAGGGGSGGGGSGGGGSGGDILLTQSPVILSVSPGERVSFSCRASQSIGTNIHWYQQRTNGSPRLLIKYASESISGIPSRFSGSGSGTDFTLSINSVESEDIADYYCQQNNNWPTTFGAGTKLELK

SEQ ID NO: 115 - DNA, 729 bp, Artificial Sequence
  EGFR ScFv
caggtgcagctgaagcagtccggccccggcctggtgcagccctcccagtccctgtccatcacctgcaccgtgtccggcttctccctgaccaactacggcgtgcactgggtgcggcagtcccccggcaagggcctggagtggctgggcgtgatctggtccggcggcaacaccgactacaacacccccttcacctcccggctgtccatcaacaaggacaactccaagtcccaggtgttcttcaagatgaactccctgcagtccaacgacaccgccatctactactgcgcccgggccctgacctactacgactacgagttcgcctactggggccagggcaccctggtgaccgtgtccgccggcggaggtggaagcggagggggaggatctggcggcggaggaagcggaggcgacatcctgctgacccagtcccccgtgatcctgtccgtgtcccccggcgagcgggtgtccttctcctgccgggcctcccagtccatcggcaccaacatccactggtaccagcagcggaccaacggctccccccggctgctgatcaagtacgcctccgagtccatctccggcatcccctcccggttctccggctccggctccggcaccgacttcaccctgtccatcaactccgtggagtccgaggacatcgccgactactactgccagcagaacaacaactggcccaccaccttcggcgccggcaccaagctggagctgaag

SEQ ID NO: 116 - protein, 244 aa, Artificial Sequence
  EGFR ScFv
QVQLVQSGAEVKKPGASVKVSCKASGYTFTSHWMHWVRQAPGQGLEWIGEFNPSNGRTNYNEKFKSKATMTVDTSTNTAYMELSSLRSEDTAVYYCASRDYDYDGRYFDYWGQGTLVTVSSGGGGSGGGGSGGGGSGGDIQMTQSPSSLSASVGDRVTITCSASSSVTYMYWYQQKPGKAPKLLIYDTSNLASGVPSRFSGSGSGTDYTFTISSLQPEDIATYYCQQWSSHIFTFGQGTKVEIK

SEQ ID NO: 117 - DNA, 731 bp, Artificial Sequence
  EGFR ScFv
aggtgcagctggtgcagtccggcgccgaggtgaagaagcccggcgcctccgtgaaggtgtcctgcaaggcctccggctacaccttcacctcccactggatgcactgggtgcggcaggcccccggccagggcctggagtggatcggcgagttcaacccctccaacggccggaccaactacaacgagaagttcaagtccaaggccaccatgaccgtggacacctccaccaacaccgcctacatggagctgtcctccctgcggtccgaggacaccgccgtgtactactgcgcctcccgggactacgactacgacggccggtacttcgactactggggccagggcaccctggtgaccgtgtcctccggcggaggtggaagcggagggggaggatctggcggcggaggaagcggaggcgacatccagatgacccagtccccctcctccctgtccgcctccgtgggcgaccgggtgaccatcacctgctccgcctcctcctccgtgacctacatgtactggtaccagcagaagcccggcaaggcccccaagctgctgatctacgacacctccaacctggcctccggcgtgccctcccggttctccggctccggctccggcaccgactacaccttcaccatctcctccctgcagcccgaggacatcgccacctactactgccagcagtggtcctcccacatcttcaccttcggccagggcaccaaggtggagatcaag

SEQ ID NO: 118 - protein, 243 aa, Artificial Sequence
  EGFR ScFv
QVQLQESGPGLVKPSETLSLTCTVSGGSVSSGDYYWTWIRQSPGKGLEWIGHIYYSGNTNYNPSLKSRLTISIDTSKTQFSLKLSSVTAADTAIYYCVRDRVTGAFDIWGQGTMVTVSSGGGGSGGGGSGGGGSGGDIQMTQSPSSLSASVGDRVTITCQASQDISNYLNWYQQKPGKAPKLLIYDASNLETGVPSRFSGSGSGTDFTFTISSLQPEDIATYFCQHFDHLPLAFGGGTKVEIK

SEQ ID NO: 119 - DNA, 729 bp, Artificial Sequence
  EGFR ScFv
caggtgcagctgcaggagtccggccccggcctggtgaagccctccgagaccctgtccctgacctgcaccgtgtccggcggctccgtgtcctccggcgactactactggacctggatccggcagtcccccggcaagggcctggagtggatcggccacatctactactccggcaacaccaactacaacccctccctgaagtcccggctgaccatctccatcgacacctccaagacccagttctccctgaagctgtcctccgtgaccgccgccgacaccgccatctactactgcgtgcgggaccgggtgaccggcgccttcgacatctggggccagggcaccatggtgaccgtgtcctccggcggaggtggaagcggagggggaggatctggcggcggaggaagcggaggcgacatccagatgacccagtccccctcctccctgtccgcctccgtgggcgaccgggtgaccatcacctgccaggcctcccaggacatctccaactacctgaactggtaccagcagaagcccggcaaggcccccaagctgctgatctacgacgcctccaacctggagaccggcgtgccctcccggttctccggctccggctccggcaccgacttcaccttcaccatctcctccctgcagcccgaggacatcgccacctacttctgccagcacttcgaccacctgcccctggccttcggcggcggcaccaaggtggagatcaag

SEQ ID NO: 120 - protein, 125 aa, Artificial Sequence [sequence omitted]

SEQ ID NO: 121 - protein, 107 aa, Artificial Sequence [sequence omitted]

SEQ ID NO: 122 - protein, 118 aa, Artificial Sequence
  EGFR VH
QIQLVQSGPELKKPGETVKISCKASGYTFTEYPIHWVKQAPGKGFKWMGMIYTDIGKPTYAEEFKGRFAFSLETSASTAYLQINNLKNEDTATYFCVRDRYDSLFDYWGQGTTLTVSS

SEQ ID NO: 123 - protein, 112 aa, Artificial Sequence
  EGFR VL
DVVMTQTPLSLPVSLGDQASISCRSSQSLVHSNGNTYLHWYLQKPGQSPKLLIYKVSNRFSGVPDRFSGSGSGTDFTLKISRVEAEDLGVYFCSQSTHVPWTFGGGTKLEIK

SEQ ID NO: 124 - protein, 121 aa, Artificial Sequence
  EGFR VH
EMQLVESGGGFVKPGGSLKLSCAASGFAFSHYDMSWVRQTPKQRLEWVAYIASGGDITYYADTVKGRFTISRDNAQNTLYLQMSSLKSEDTAMFYCSRSSYGNNGDALDFWGQGTSVTVSS

SEQ ID NO: 125 - protein, 111 aa, Artificial Sequence
  EGFR VL
DVVMTQTPLSLPVSLGDQASISCRSSQSLVHSNGNTYLHWYLQKPGQSPKLLIYKVSNRFSGVPDRFSGSGSGTDFTLKISRVEAEDLGVYFCSQSTHVLTFGSGTKLEIK

SEQ ID NO: 126 - protein, 119 aa, Artificial Sequence
  EGR VH
QVQLKQSGPGLVQPSQSLSITCTVSGFSLTNYGVHWVRQSPGKGLEWLGVIWSGGNTDYNTPFTSRLSINKDNSKSQVFFKMNSLQSNDTAIYYCARALTYYDYEFAYWGQGTLVTVSA

SEQ ID NO: 127 - protein, 107 aa, Artificial Sequence
  EGFR VL
DILLTQSPVILSVSPGERVSFSCRASQSIGTNIHWYQQRTNGSPRLLIKYASESISGIPSRFSGSGSGTDFTLSINSVESEDIADYYCQQNNNWPTTFGAGTKLELK

SEQ ID NO: 128 - protein, 121 aa, Artificial Sequence [sequence omitted]

SEQ ID NO: 129 - protein, 106 aa, Artificial Sequence [sequence omitted]

SEQ ID NO: 130 - protein, 119 aa, Artificial Sequence [sequence omitted]

SEQ ID NO: 131 - protein, 107 aa, Artificial Sequence [sequence omitted]

SEQ ID NO: 132 - protein, 5 aa, Artificial Sequence
  EGFR CDR-H1
TYGMH

SEQ ID NO: 133 - protein, 5 aa, Artificial Sequence
  EGFR CDR-H1
EYPIH

SEQ ID NO: 134 - protein, 5 aa, Artificial SEquence
  EGFR CDR-H1
HYDMS

SEQ ID NO: 135 - protein, 5 aa, Artificial Sequence
  EGFR CDR-H1
NYGVH

SEQ ID NO: 136 - protein, 5 aa, Artificial Sequence
  EGFR CDR-H1
SHWMH

SEQ ID NO: 137 - protein, 7 aa, Artificial Sequence
  EGFR CDR-H1
SGDYYWT

SEQ ID NO: 138 - protein, 17 aa, Artificial Sequence
  EGFR CDR-H2
VIWDDGSYKYYGDSVKG

SEQ ID NO: 139 - protein, 17 aa, Artificial Sequence
  EGFR CDR-H2
MIYTDIGKPTYAEEFKG

SEQ ID NO: 140 - protein, 17 aa, Artificial Sequence
  EGFR CDR-H2
YIASGGDITYYADTVKG

SEQ ID NO: 141 - protein, 16 aa, Artificial Sequence
  EGFR CDR-H2
VIWSGGNTDYNTPFTS

SEQ ID NO: 142 - protein, 17 aa, Artificial Sequence
  EGFR CDR-H2
EFNPSNGRTNYNEKFKS

SEQ ID NO: 143 - protein, 16 aa, Artificial Sequence
  EGFR CDR-H2
HIYYSGNTNYNPSLKS

SEQ ID NO: 144 - protein, 16 aa, Artificial Sequnece
  EGFR CDR-H3
DGITMVRGVMKDYFDY

SEQ ID NO: 145 - protein, 9 aa, Artificial Sequence
  EGFR CDR-H3
DRYDSLFDY

SEQ ID NO: 146 - protein, 12 aa, Artificial Sequence
  EGFR CDR-H3
SSYGNNGDALDF

SEQ ID NO: 147 - protein, 11 aa, Artificial Sequence
  EGFR CDR-H3
ALTYYDYEFAY

SEQ ID NO: 148 - protein, 12 aa, Artificial Sequence
  EGFR CDR-H3
RDYDYDGRYFDY

SEQ ID NO: 149 - protein, 9 aa, Artificial Sequence
  EGFR CDR-H3
DRVTGAFDI

SEQ ID NO: 150 - protein, 11 aa, Artificial Sequence
  EGFR CDR-L1
RASQDISSALV

SEQ ID NO: 151 - protein, 16 aa, Artificial Sequence
  EGFR CDR-L1
RSSQSLVHSNGNTYLH

SEQ ID NO: 152 - protein, 16 aa, Artificial Sequence
  EGFRR CDR-L1
RSSQSLVHSNGNTYLH

SEQ ID NO: 153 - protein, 11 aa, Artificial Sequence
  EGFR CDR-L1
RASQSIGTNIH

SEQ ID NO: 154 - protein, 10 aa, Artificial Sequence
  EGFR CDR-L1
SASSSVTYMY

SEQ ID NO: 155 - protein, 11 aa, Artificial Sequence
  EGFR CDR-L1
QASQDISNYLN

SEQ ID NO: 156 - protein, 7 aa, Artificial Sequence
  EGFR CDR-L2
DASSLES

SEQ ID NO: 157 - protein, 7 aa, Artificial Sequence
  EGFR CDR-L2
KVSNRFS

SEQ ID NO: 158 - protein, 7 aa, Artificial Sequence
  EGFR CDR-L2
YASESIS

SEQ ID NO: 159 - protein, 7 aa, Artificial Sequence
  EGFR CDR-L2
DTSNLAS

SEQ ID NO: 160 - protein, 7 aa, Artificial Sequence
  EGFR CDR-L2
DASNLET

SEQ ID NO: 161 - protein, 9 aa, Artificial Sequence
  EGFR CDR-L3
QQFNSYPLT

SEQ ID NO: 162 - protein, 9 aa, Artificial Sequence
  EGFR CDR-L3
SQSTHVPWT

SEQ ID NO: 163 - protein, 8 aa, Artificial Sequence
  EGFR CDR-L3
SQSTHVLT

SEQ ID NO: 164 - protein, 9 aa, Artificial Sequence
  EGFR CDR-L3
QQNNNWPTT

SEQ ID NO: 165 - protein, 9 aa, Artificial Sequence
  EGFR CDR-L3
QQWSSHIFT

SEQ ID NO: 166 - protein, 9 aa, Artificial Sequence
  EGFR CDR-L3
QHFDHLPLA

SEQ ID NO: 167 - protein, 246 aa, Artificial Sequence
  pan-HLA ScFv
QVQLKQSGPGLVQPSQSLSLTCTVSGFSLTSYGVHWVRQPPGKGLEWLGVIWSGGSTDYNAAFISRLSIRKDNSKSQVFFKMNSLQADDTAIYYCARTFTTSTSAWFAYWGQGTLVTVSAGGGGSGGGGSGGGGSGGSIVMTQTPKFLLVSAGDRVTITCKASQSVSNDVAWYQQKPGQSPICLLIYYASNRYTGVPDRFTGSGYGTDFTFTISTVQAEDLAVYFCQQDYSSPPWTFGGGTKLEIR

SEQ ID NO: 168 - DNA, 738 bp, Artificial Sequence
  pan-HLA ScFv
caggtgcagctgaagcagtcaggacctggcctagtgcagccctcacagagcctgtccctgacctgcacagtctctggtttctcattaactagttatggcgtacactgggttcgccagcctccaggaaagggtctggagtggctgggagtgatctggagtggtggaagcacagactataatgctgctttcatatccagactgagcatcaggaaggacaactccaagagccaagtcttctttaaaatgaacagtctgcaagctgatgacacagccatatactactgtgccagaacctttactacgtctacctcggcctggtttgcttactggggccaagggactctggtcactgtctctgcaggcggaggtggaagcggagggggaggatctggcggcggaggaagcggaggcagcatcgtgatgacccagactccaaaattcctgcttgtgtctgcgggagacagagtcaccatcacttgcaaggcgagtcagtctgtgagcaacgacgtagcttggtatcagcagaaaccagggcaatctcctatctgtctcctgatctactatgcatctaatcggtatacaggggtccctgataggttcaccggaagtggatatgggacagatttcactttcaccatcagcaccgtgcaggctgaagatcttgcagtatatttctgtcaacaggattatagtagtcctccgtggactttcggcggagggaccaagttggagatcaga

SEQ ID NO: 169 - protein, 245 aa, Artificial Sequence
  pan-HLA ScFv
QVQLQESGPGLVKPSQTLSLTCTVSGFSLTSYGVHWIRQPPGKGLEWIGVIWSGGSTDYNAAFISRVTISVDTSKNQFSLKLSSVTAADTAVYYCARTFTTSTSAWFAYWGQGTLVTVSSGGGGSGGGGSGGGGSGGDIVMTQSPDSLAVSLGERATINCKASQSVSNDVAWYQQKPGQPPKLLIYYASNRYTGVPDRFSGSGSGTDFTLTISSLQAEDVAVYYCQQDYSSPPWTFGGGTKVEIK

SEQ ID NO: 170 - DNA, 735 bp, Artificial Sequence
  pan-HLA ScFv
caggtgcagctgcaggagtccggacctggcctagtgaagccctcacagaccctgtccctgacctgcacagtctctggtttctcattaactagctatggtgtacactggattagacagcctccaggaaagggtctggagtggattggagtgatctggagtggtggaagcacagactataatgctgctttcatatccagagtgaccatcagcgtggacacctccaagaaccaattctcccttaaactgagcagtgtgacagctgccgacacagccgtatactactgtgccagaacctttactacgtctacctcggcctggtttgcttactggggccaagggactctggtcactgtctcttcaggcggaggtggaagcggagggggaggatctggcggcggaggaagcggaggcgacatcgtgatgacccagagtccagattccctggctgtgtctctgggagagagagccaccatcaattgcaaggcgagtcagtctgtgagcaacgacgtagcttggtatcagcagaaaccagggcaacctcctaaactcctgatctactatgcatctaatcggtatacaggggtccctgataggttcagcggaagtggatctgggacagatttcactctcaccatcagcagcctgcaggctgaagatgttgcagtatattactgtcaacaggattatagtagtcctccgtggactttcggcggagggaccaaggtggagatcaaa

SEQ ID NO: 171 - protein, 245 aa, Artificial Sequence
  pan-HLA ScFv
EVQLLESGGGLVQPGGSLRLSCAASGFSLTSYGVHWVRQAPGKGLEWVSVIWSGGSTDYNAAFISRFTISRDNSKNTLYLQMNSLRAEDTAVYYCARTFTTSTSAWFAYWGQGTLVTVSSGGGGSGGGGSGGGGSGGDIQMTQSPSSLSASVGDRVTITCKASQSVSNDVAWYQQKPGKAPKLLIYYASNRYTGVPSRFSGSGSGTDFTFTISSLQPEDIATYYCQQDYSSPPWTFGGGTKVEIK

SEQ ID NO: 172 - DNA, 735 bp, Artificial Sequence
  pan-HLA ScFv
gaggtgcagctgctggagtccggaggtggcctagtgcagcccggagggagcctgcgcctgagctgcgcagcctctggtttctcattaactagctatggtgtacactgggttagacaggctccaggaaagggtctggagtgggttagcgtgatctggagtggtggaagcacagactataatgctgctttcatatccagatttaccatcagccgggacaactccaagaacacactctaccttcaaatgaacagtttgagagctgaagacacagccgtatactactgtgccagaacctttactacgtctacctcggcctggtttgcttactggggccaagggactctggtcactgtctcttcaggcggaggtggaagcggagggggaggatctggcggcggaggaagcggaggcgacatccagatgacccagagtccaagctccctgtctgcgtctgtgggagacagagtcaccatcacttgcaaggcgagtcagtctgtgagcaacgacgtagcttggtatcagcagaaaccagggaaagctcctaaactcctgatctactatgcatctaatcggtatacaggggtccctagtaggttcagcggaagtggatctgggacagatttcactttcaccatcagcagcctgcagcctgaagatattgcaacatattactgtcaacaggattatagtagtcctccgtggactttcggcggagggaccaaggtggagatcaaa

SEQ ID NO: 173 - protein, 245 aa, Artificial Sequence
  pan-HLA ScFv
QVQLQESGPGLVKPSETLSLTCTVSGFSLTSYGVHWIRQPPGKGLEWIGVIWSGGSTDYNAAFISRVTISRDTSKNQFSLKLSSVTAADTAVYYCARTFTTSTSAWFAYWGQGTLVTVSSGGGGSGGGGSGGGGSGGDIVMTQTPLSLSVTPGQPASISCKASQSVSNDVAWYLQKPGQSPQLLIYYASNRYTGVPDRFSGSGSGTDFTLKISRVEAEDVGVYYCQQDYSSPPWTFGGGTKVEIK

SEQ ID NO: 174 - DNA, 735 bp, Artificial Sequence
  pan-HLA ScFv
caggtgcagctgcaggagtccggacctggcctagtgaagccctcagaaaccctgtccctgacctgcacagtctctggtttctcattaactagctatggtgtacactggattagacagcctccaggaaagggtctggagtggattggagtgatctggagtggtggaagcacagactataatgctgctttcatatccagagtgaccatcagcagggacacctccaagaaccaattctcccttaaactgagcagtgtgacagctgccgacacagccgtatactactgtgccagaacctttactacgtctacctcggcctggtttgcttactggggccaagggactctggtcactgtctcttcaggcggaggtggaagcggagggggaggatctggcggcggaggaagcggaggcgacatcgtgatgacccagactccactttccctgtctgtgactccgggacagccagccagcatcagttgcaaggcgagtcagtctgtgagcaacgacgtagcttggtatctgcagaaaccagggcaatctcctcaactcctgatctactatgcatctaatcggtatacaggggtccctgataggttcagcggaagtggatctgggacagatttcactttgaagatcagcagggtggaggctgaagatgttggagtatattactgtcaacaggattatagtagtcctccgtggactttcggcggagggaccaaggtggagatcaaa

SEQ ID NO: 175 - protein, 245 aa, Artificial Sequence
  pan-HLA ScFv
QVQLVESGGGVVQPGRSLRLSCAVSGFSLTSYGMHWVRQAPGKGLEWVAVIWSGGSTDYNAAFISRFTISRDNSKNTLYLQMNSLRAEDTAVYYCAKTFTTSTSAWFAYWGQGTLVTVSSGGGGSGGGGSGGGGSGGEIVLTQSPATLSLSPGERATLSCRASQSVSNDLAWYQQKPGQAPRLLIYYASNRYTGVPDRFSGSGSGTDFTLTISSLEPEDFAVYYCQQDYSSPPWTFGQGTKVEIK

SEQ ID NO: 176 - DNA, 735 bp, Artificial Sequence
  pan-HLA ScFv
caggtgcagctggtggagtccggaggtggcgtagtgcagcccggaaggagcctgcgcctgagctgcgcagtctctggtttctcattaactagctatggtatgcactgggttagacaggctccaggaaagggtctggagtgggttgcagtgatctggagtggtggaagcacagactataatgctgctttcatatccagatttaccatcagccgggacaactccaagaacacactctaccttcaaatgaacagtttgagagctgaagacacagccgtatactactgtgccaaaacctttactacgtctacctcggcctggtttgcttactggggccaagggactctggtcactgtctcttcaggcggaggtggaagcggagggggaggatctggcggcggaggaagcggaggcgagatcgtgctgacccagagtccagctaccctgtctctgtctccgggagagagagccaccctcagttgcagggcgagtcagtctgtgagcaacgacctagcttggtatcagcagaaaccagggcaagctcctagactcctgatctactatgcatctaatcggtatacaggggtccctgataggttcagcggaagtggatctgggacagatttcactctcaccatcagcagcctggagcctgaagattttgcagtatattactgtcaacaggattatagtagtcctccgtggactttcggccaagggaccaaggtggagatcaaa

SEQ ID NO: 177 - protein, 245 aa, Artificial Sequence
  pan-HLA ScFv
QVQLVESGGGVVQPGRSLRLSCAVSGFSLTSYGMHWVRQAPGKGLEWVAVIWSGGSTDYNAAFISRFTISRDNSKNTLYLQMNSLRAEDTAVYYCARTFTTSTSAWFAYWGQGTLVTVSSGGGGSGGGGSGGGGSGGDIQMTQSPSSLSASVGDRVTITCQASQSVSNDLNWYQQKPGKAPKLLIYYASNRYTGVPDRFSGSGSGTDFTFTISSLQPEDIATYYCQQDYSSPPWTFGGGTKVEIK

SEQ ID NO: 178 - DNA, 735 bp, Artificial Sequence
  pan-HLA ScFv
caggtgcagctggtggagtccggaggtggcgtagtgcagcccggaaggagcctgcgcctgagctgcgcagtctctggtttctcattaactagctatggtatgcactgggttagacaggctccaggaaagggtctggagtgggttgcagtgatctggagtggtggaagcacagactataatgctgctttcatatccagatttaccatcagccgggacaactccaagaacacactctaccttcaaatgaacagtttgagagctgaagacacagccgtatactactgtgccagaacctttactacgtctacctcggcctggtttgcttactggggccaagggactctggtcactgtctcttcaggcggaggtggaagcggagggggaggatctggcggcggaggaagcggaggcgacatccagatgacccagagtccaagctccctgtctgcgtctgtgggagacagagtcaccatcacttgccaggcgagtcagtctgtgagcaacgacctaaattggtatcagcagaaaccagggaaagctcctaaactcctgatctactatgcatctaatcggtatacaggggtccctgataggttcagcggaagtggatctgggacagatttcactttcaccatcagcagcctgcagcctgaagatattgcaacatattactgtcaacaggattatagtagtcctccgtggactttcggcggagggaccaaggtggagatcaaa

SEQ ID NO: 179 - DNA, 741 bp, Artificial Sequence
  HLA-A*02 antigen binding domain
gatgttttgatgacccaaactccactctccctgcctgtcagtcttggagatcaagcctccatctcttgcagatctagtcagagcattgtacatagtaatggaaacacctatttagaatggtacctgcagaaaccaggccagtctccaaagctcctgatctacaaagtttccaaccgattttctggggtcccagacaggttcagtggcagtggatcagggacagatttcacactcaagatcagtagagtggaggctgaggatctgggagtttattactgctttcaaggttcacatgttcctcggacgtccggtggaggcaccaagctggaaatcaaaggcggaggtggaagcggagggggaggatctggcggcggaggaagcggaggccaggtccagctgcagcagtctggacctgagctggtgaagcctggggcttcagtgaggatatcctgcaaggcttctggctacaccttcacaagttaccatatacattgggtgaagcagaggcctggacagggacttgagtggattggatggatttatcctggaaatgttaatactgagtacaatgagaagttcaagggcaaggccacactgactgcagacaaatcgtccagcacagcctacatgcacctcagcagcctgacctctgaggactctgcggtctatttctgtgccagagaggagattacctatgctatggactactggggtcaaggaacctcagtcaccgtgtcctca

SEQ ID NO: 180 - DNA, 741 bp, Artificial Sequence
  HLA-A*02 antigen binding domain
caggtgcagctggtgcagtctggggctgaggtgaagaagcctgggtcctcagtgaaggtttcctgcaaggcttctggatacaccttcactagctatcatatacattgggtgcgccaggcccccggacaagggcttgagtggatgggatggatctaccctggcaatgttaacacagaatataatgagaagttcaagggcaaagccaccattaccgcggacaaatccacgagcacagcctacatggagctgagcagcctgagatctgaagacacggctgtgtattactgtgcgagggaggaaattacctacgctatggactactggggccagggaaccacagtcaccgtgtcctcaggcggaggtggaagcggagggggaggatctggcggcggaggaagcggaggcgagattgtattgacccagagcccaggcaccctgagcctctctccaggagagcgggccaccctcagttgtagatccagtcagagtattgtacacagtaatgggaacacctatttggaatggtatcagcagaaaccaggtcaagccccaagattgctcatctacaaagtctctaacagatttagtggtattccagacaggttcagcggttccggaagtggtactgatttcaccctcacgatctccaggctcgagccagaagatttcgccgtttattactgttttcaaggttcacatgtgccgcgcacattcggtgggggtactaaagtagaaatcaaa

SEQ ID NO: 181 - DNA, 741 bp, Artificial Sequence
  HLA-A*02 antigen binding domain
caggtgcagctggtgcagtctggggctgaggtgaagaagcctgggtcctcagtgaaggtttcctgcaaggcttctggatacaccttcactagctatcatatacattgggtgcgccaggcccccggacaagggcttgagtggatgggatggatctaccctggcaatgttaacacagaatataatgagaagttcaagggcaaagccaccattaccgcggacaaatccacgagcacagcctacatggagctgagcagcctgagatctgaagacacggctgtgtattactgtgcgagggaggaaattacctacgctatggactactggggccagggaaccacagtcaccgtgtcctcaggcggaggtggaagcggagggggaggatctggcggcggaggaagcggaggcgacattgtaatgacccagaccccactcagcctgcccgtcactccaggagagccggccagcatcagttgtagatccagtcagagtattgtacacagtaatgggaacacctatttggaatggtatctgcagaaaccaggtcaatccccacaattgctcatctacaaagtctctaacagatttagtggtgtaccagacaggttcagcggttccggaagtggtactgatttcaccctcaagatctccagggtcgaggcagaagatgtcggcgtttattactgttttcaaggttcacatgtgccgcgcacattcggtgggggtactaaagtagaaatcaaa

SEQ ID NO: 182 - DNA, 741 bp, Artificial Sequence
  HLA-A*02 antigen binding domain
gaggtgcagctggtggagtctgggggtgggctggtgaagcctgggggctcactgaggctttcctgcgcggcttctggatacaccttcactagctatcatatacattgggtgcgccaggcccccggaaaagggcttgagtgggtgggatggatctaccctggcaatgttaacacagaatataatgagaagttcaagggcagattcaccattagcagggacgattccaagaacacactctacctgcagatgaacagcctgaaaactgaagacacggctgtgtattactgtgcgagggaggaaattacctacgctatggactactggggccagggaaccacagtcaccgtgtcctcaggcggaggtggaagcggagggggaggatctggcggcggaggaagcggaggcgacattcaaatgacccagagcccatccagcctgagcgcatctgtaggtgaccgggtcaccatcacttgtagatccagtcagagtattgtacacagtaatgggaacacctatttggaatggtatcagcagaaaccaggtaaagccccaaaattgctcatctacaaagtctctaacagatttagtggtgtaccaagcaggttcagcggttccggaagtggtactgatttcaccctcacgatctcctctctccagccagaagatttcgccacttattactgttttcaaggttcacatgtgccgcgcacattcggtgggggtactaaagtagaaatcaaa

SEQ ID NO: 183 - DNA, 741 bp, Artificial Sequence
  HLA-A*02 antigen binding domain
caggtgcagctggtgcagtctggggctgaggtgaagaagcctgggtcctcagtgaaggtttcctgcaaggcttctggatacaccttcactagctatcatatacattgggtgcgccaggcccccggacaagggcttgagtggatcggatggatctaccctggcaatgttaacacagaatataatgagaagttcaagggcaaagccaccattaccgcggacgaatccacgaacacagcctacatggagctgagcagcctgagatctgaagacacggctgtgtattactgtgcgagggaggaaattacctacgctatggactactggggccagggaaccctggtcaccgtgtcctcaggcggaggtggaagcggagggggaggatctggcggcggaggaagcggaggcgacattcaaatgacccagagcccatccaccctgagcgcatctgtaggtgaccgggtcaccatcacttgtagatccagtcagagtattgtacacagtaatgggaacacctatttggaatggtatcagcagaaaccaggtaaagccccaaaattgctcatctacaaagtctctaacagatttagtggtgtaccagccaggttcagcggttccggaagtggtactgaattcaccctcacgatctcctctctccagccagatgatttcgccacttattactgttttcaaggttcacatgtgccgcgcacattcggtcagggtactaaagtagaagtcaaa

SEQ ID NO: 184 - DNA, 741 bp, Artificial Sequence
  HLA-A*02 antigen binding domain
caggtgcagctggtgcagtctggggctgaggtgaagaagcctgggtcctcagtgaaggtttcctgcaaggcttctggatacaccttcactagctatcatatgcattgggtgcgccaggcccccggacaagggcttgagtggatcggatacatctaccctggcaatgttaacacagaatataatgagaagttcaagggcaaagccacccttaccgcggacaaatccacgaacacagcctacatggagctgagcagcctgagatctgaagacacggctgtgtatttctgtgcgagggaggaaattacctacgctatggactactggggccagggaaccctggtcaccgtgtcctcaggcggaggtggaagcggagggggaggatctggcggcggaggaagcggaggcgacgttcaaatgacccagagcccatccaccctgagcgcatctgtaggtgaccgggtcaccatcacttgtagctccagtcagagtattgtacacagtaatgggaacacctatatggaatggtatcagcagaaaccaggtaaagccccaaaattgctcatctacaaagtctctaacagatttagtggtgtaccagacaggttcagcggttccggaagtggtactgaattcaccctcacgatctcctctctccagccagatgatttcgccacttattactgtcatcaaggttcacatgtgccgcgcacattcggtcagggtactaaagtagaagtcaaa

SEQ ID NO: 185 - DNA, 741 bp, Artificial Sequence
  HLA-A*02 antigen binding domain
caggtgcagctgcagcagtctgggcctgagctggtgaagcctggggcctcagtgaagatgtcctgcaaggcttctggatacaccttcactagctatcatatccagtgggtgaagcagaggcctggacaagggcttgagtggatcggatggatctaccctggcgatggtagtacacagtataatgagaagttcaagggcaaaaccacccttaccgcggacaaatcctccagcacagcctacatgttgctgagcagcctgacctctgaagactctgctatctatttctgtgcgagggaggggacctactacgctatggactactggggccagggaacctcagtcaccgtgtcctcaggcggaggtggaagcggagggggaggatctggcggcggaggaagcggaggcgatgttttgatgacccagactccactctccctgcctgtctctcttggagaccaagtctccatctcttgtagatccagtcagagtattgtacacagtaatgggaacacctatttagaatggtatctgcagaaaccaggtcagtctccaaagttgctcatctacaaagtctctaacagatttagtggtgtaccagacaggttcagcggttccggaagtggtactgatttcaccctcaagatctcgagagtggaggctgaggatctgggagtttattactgttttcaaggttcacatgtgccgcgcacattcggtggaggtactaaactggaaatcaaa

SEQ ID NO: 186 - DNA, 741 bp, Artificial Sequence
  HLA-A*02 antigen binding domain
cagctgcagctgcaggagtctgggcccgggctggtgaagccttcggaaacgctgagcctcacctgcacggtttctggatacaccttcaccagctatcatatccagtggatccgacagccccctggaaaagggcttgagtggatcggatggatctaccctggcgatggttcaacacagtacaatgagaagttcaagggcagagccacgattagcgtggacacatccaagaaccaattctccctgaacctggacagcgtgagtgctgcggacacggccatttattactgtgcgagagagggaacttactacgctatggactactggggcaaagggagcacggtcaccgtgtcctcaggcggaggtggaagcggagggggaggatctggcggcggaggaagcggaggcgacatccagatgacccagagcccaagctccctgagtgcgtccgtgggcgaccgcgtgaccatcacttgcagatcctctcagtccatcgtgcactccaacggcaacacgtacctcgagtggtaccagcagaagcccgggaaggccccgaaactgctcatctacaaggtgagcaaccggttctccggcgtccccagccgcttctcagggtccggctcggggacggatttcaccttcacgattagcagcttgcagcccgaagacatcgccacgtactactgctttcagggaagtcacgtgccgcgtaccttcgggccgggcacgaaagtggatattaag

SEQ ID NO: 187 - DNA, 741 bp, Artificial Sequence
  HLA-A*02 antigen binding domain
gaggtgcagctggtgcagtctggggccgagctgaagaagcctgggtcctcggtgaaggtgtcctgcaaggcttctggatacaccttcaccagctatcatatccagtgggtaaaacaggcccctggacaagggcttgagtggatcggatggatctaccctggcgatggttcaacacagtacaatgagaagttcaagggcaaagccacgcttaccgtggacaaatccacgaacacagcctacatggagctgagcagcctgagatctgaggacacggccgtatattactgtgcgagagagggaacttactacgctatggactactggggccaagggaccctggtcaccgtgtcctcaggcggaggtggaagcggagggggaggatctggcggcggaggaagcggaggcgacatccagatgacccagagcccatccaccctgagtgcgtccgtgggcgaccgcgtgaccatcacttgcagatcctctcagtccatcgtgcactccaacggcaacacgtacctcgagtggtaccagcagaagcccgggaaggccccgaaactgctcatctacaaggtgagcaaccggttctccggcgtccccagccgcttctcagggtccggctcggggacggatttcaccctcacgattagcagcttgcagcccgatgacttcgccacgtactactgctttcagggaagtcacgtgccgcgtaccttcgggcagggcacgaaagtggaagttaag

SEQ ID NO: 188 - DNA, 741 bp, Artificial Sequence
  HLA-A*02 antigen binding domain
caggtgcagctggtgcagtctggggccgaggtgaagaagcctgggtcctcggtgaaggtgtcctgcaaggcttctggatacaccttcaccagctatcatatccagtgggtacgacaggcccctggacaagggcttgagtggatgggatggatctaccctggcgatggttcaacacagtacaatgagaagttcaagggcagagtcacgattaccgcggacaaatccacgagcacagcctacatggagctgagcagcctgagatctgaggacacggccgtatattactgtgcgagagagggaacttactacgctatggactactggggccaagggaccacggtcaccgtgtcctcaggcggaggtggaagcggagggggaggatctggcggcggaggaagcggaggcgagatcgtcctgacccagagcccagggaccctgagtttgtccccgggcgagcgcgcgaccctcagttgcagatcctctcagtccatcgtgcactccaacggcaacacgtacctcgagtggtaccagcagaagcccgggcaggccccgcgactgctcatctacaaggtgagcaaccggttctccggcatccccgaccgcttctcagggtccggctcggggacggatttcaccctcacgattagccgcttggagcccgaagacttcgccgtgtactactgctttcagggaagtcacgtgccgcgtaccttcggggggggcacgaaagtggaaattaag

SEQ ID NO: 189 - DNA, 741 bp, Artificial Sequence
  HLA-A*02 antigen binding domain
caggtgaccctgaagcagtctggggccgaggtgaagaagcctgggtcctcggtgaaggtgtcctgcacggcttctggatacaccttcaccagctatcatgtcagctgggtacgacaggcccctggacaagggcttgagtggttgggaaggatctaccctggcgatggttcaacacagtacaatgagaagttcaagggcaaagtcacgattaccgcggacaaatccatggacacatccttcatggagctgaccagcctgacatctgaggacacggccgtatattactgtgcgagagagggaacttactacgctatggacctctggggccaagggaccctggtcaccgtgtcctcaggcggaggtggaagcggagggggaggatctggcggcggaggaagcggaggcgagatcgtcctgacccagagcccagggaccctgagtttgtccccgggcgagcgcgcgaccctcagttgcagatcctctcagtccatcgtgcactccaacggcaacacgtacctcgcgtggtaccagcagaagcccgggcaggccccgcgactgctcatctccaaggtgagcaaccggttctccggcgtccccgaccgcttctcagggtccggctcggggacggatttcaccctcacgattagccgcttggagcccgaagacttcgccgtgtactactgccaacagggaagtcacgtgccgcgtaccttcggggggggcacgaaagtggaaattaag

SEQ ID NO: 190 - DNA, 741 bp, Artificial Sequence
  HLA-A*02 antigen binding domain
caggtgcagctggtgcagtctggggccgaggtgaagaagcctggggcctcggtgaaggtgtcctgcaaggcttctggatacaccttcaccagctatcatatgcactgggtacgacaggcccctggacaaaggcttgagtggatgggatggatctaccctggcgatggttcaacacagtacaatgagaagttcaagggcaaagtcacgattacccgggacacatccgcgagcacagcctacatggagctgagcagcctgagatctgaggacacggccgtatattactgtgcgagagagggaacttactacgctatggactactggggccaagggaccctggtcaccgtgtcctcaggcggaggtggaagcggagggggaggatctggcggcggaggaagcggaggcgacatcgtcatgacccagaccccactgtccctgcctgtgaccccgggcgagcccgcgagcatcagttgcagatcctctcagtccatcgtgcactccaacggcaacacgtacctcgactggtacctgcagaagcccgggcagtccccgcaactgctcatctacaaggtgagcaaccggttctccggcgtccccgaccgcttctcagggtccggctcggggacggatttcaccctcaagattagccgcgtggaggccgaagacgtcggcgtgtactactgcatgcagggaagtcacgtgccgcgtaccttcggggggggcacgaaagtggaaattaag

SEQ ID NO: 191 - protein, 9 aa, Artificial Sequence
  HA-1 variant H peptide
VLHDDLLEA

SEQ ID NO: 192 - protein, 19 aa, Artificial Sequence
  P2A self cleaving peptide
ATNFSLLKQAGDVEENPGP

SEQ ID NO: 193 - protein, 608 aa, Artificial Sequence
  HA-1H TCR alpha and beta
MVKIRQFLLAILWLQLSCVSAAKNEVEQSPQNLTAQEGEFITINCSYSVGISALHWLQQHPGGGIVSLFMLSSGKKKHGRLIATINIQEKHSSLHITASHPRDSAVYICAVRSVSGAGSYQLTFGKGTKLSVIPNIQNPDPAVYQLRDSKSSDKSVCLFTDFDSQTNVSQSKDSDVYITDKCVLDMRSMDFKSNSAVAWSNKSDFACANAFNNSIIPEDTFFPSPESSCDVKLVEKSFETDTNLNFQNLSVIGFRILLLKVAGFNLLMTLRLWSSGSGATNFSLLKQAGDVEENPGPMGTSLLCWMALCLLGADHADTGVSQNPRHKITKRGQNVTFRCDPISEHNRLYWYRQTLGQGPEFLTYFQNEAQLEKSRLLSDRFSAERPKGSFSTLEIQRTEQGDSAMYLCASSIDSFNEQFFGPGTRLTVLEDLKNVFPPEVAVFEPSEAEISHTQKATLVCLATGFYPDHVELSWWVNGKEVHSGVCTDPQPLKEQPALNDSRYCLSSRLRVSATFWQNPRNHFRCQVQFYGLSENDEWTQDRAKPVTQIVSAEAWGRADCGFTSESYQQGVLSATILYEILLGKATLYAVLVSALVLMAMVKRKDSRG

SEQ ID NO: 194 - DNA, 1827 bp, Artificial Sequence
  HA-1(H) TCR alpha and beta
atggtgaagatccggcaatttttgttggctattttgtggcttcagctaagctgtgtaagtgccgccaaaaatgaagtggagcagagtcctcagaacctgactgcccaggaaggagaatttatcacaatcaactgcagttactcggtaggaataagtgccttacactggctgcaacagcatccaggaggaggcattgtttccttgtttatgctgagctcagggaagaagaagcatggaagattaattgccacaataaacatacaggaaaagcacagctccctgcacatcacagcctcccatcccagagactctgccgtctacatctgtgctgtcagaagcgtgtccggggccggctcctaccagctcacctttgggaaggggaccaaattatcagtcattccaaatatccagaaccctgaccctgccgtgtaccagctgagagactctaaatccagtgacaagtctgtctgcctattcaccgattttgattctcaaacaaatgtgtcacaaagtaaggattctgatgtgtatatcacagacaaatgtgtgctagacatgaggtctatggacttcaagagcaacagtgctgtggcctggagcaacaaatctgactttgcatgtgcaaacgccttcaacaacagcattattccagaagacaccttcttccccagcccagaaagttcctgtgatgtcaagctggtcgagaaaagctttgaaacagatacgaacctaaactttcaaaacctgtcagtgattgggttccgaatcctcctcctgaaagtggccgggtttaatctgctcatgacgctgcggctgtggtccagcggatccggagccaccaacttcagcctgctgaagcaggccggcgacgtggaggagaaccccggccccatgggcaccagcctcctctgctggatggccctgtgtctcctgggggcagatcacgcagatactggagtctcccagaaccccagacacaagatcacaaagaggggacagaatgtaactttcaggtgtgatccaatttctgaacacaaccgcctttattggtaccgacagaccctggggcagggcccagagtttctgacttacttccagaatgaagctcaactagaaaaatcaaggctgctcagtgatcggttctctgcagagaggcctaagggatctttctccaccttggagatccagcgcacagagcagggggactcggccatgtatctctgtgccagcagcatcgactccttcaacgagcagttcttcgggccgggcaccaggctcacggtcctcgaggacctgaaaaacgtgttcccacccgaggtcgctgtgtttgagccatcagaagcagagatctcccacacccaaaaggccacactggtgtgcctggccacaggcttctaccccgaccacgtggagctgagctggtgggtgaatgggaaggaggtgcacagtggggtctgcacagacccgcagcccctcaaggagcagcccgccctcaatgactccagatactgcctgagcagccgcctgagggtgtcggccaccttctggcagaacccccgcaaccacttccgctgtcaagtccagttctacgggctctcggagaatgacgagtggacccaggatagggccaaacctgtcacccagatcgtcagcgccgaggcctggggtagagcagactgtggcttcacctccgagtcttaccagcaaggggtcctgtctgccaccatcctctatgagatcttgctagggaaggccaccttgtatgccgtgctggtcagtgccctcgtgctgatggccatggtcaagagaaaggattccagaggctag

SEQ ID NO: 195 - protein, 440 aa, Artificial Sequence
  Ftcr alpha LIR1 HA-1H
MVKIRQFLLAILWLQLSCVSAAKNEVEQSPQNLTAQEGEFITINCSYSVGISALHWLQQHPGGGIVSLFMLSSGKKKHGRLIATINIQEKHSSLHITASHPRDSAVYICAVRSVSGAGSYQLTFGKGTKLSVIPNIQNPDPAVYQLRDSKSSDKSVCLFTDFDSQTNVSQSKDSDVYITDKCVLDMRSMDFKSNSAVAWSNKSDFACANAFNNSIIPEDTFFPSPESSCDVKLVEKSFETDTNLNFQNLSVVIGILVAVILLLLLLLLLFLILRHRRQGKHWTSTQRKADFQHPAGAVGPEPTDRGLQWRSSPAADAQEENLYAAVKHTQPEDGVEMDTRSPHDEDPQAVTYAEVKHSRPRREMASPPSPLSGEFLDTKDRQAEEDRQMDTEAAASEAPQDVTYAQLHSLTLRREATEPPPSQEGPSPAVPSIYATLAIH

SEQ ID NO: 196 - DNA, 1279 bp, Artificial Sequence
  Ftcr alpha LIR1 HA-1H
atggtgaagatccggcaatttttgttggctattttgtggcttcagctaagctgtgtaagtgccgccaaaaatgaagtggagcagagtcctcagaacctgactgcccaggaaggagaatttatcacaatcaactgcagttactcggtaggaataagtgccttacactggctgcaacagcatccaggaggaggcattgtttccttgtttatgctgagctcagggaagaagaagcatggaagattaattgccacaataaacatacaggaaaagcacagctccctgcacatcacagcctcccatcccagagactctgccgtctacatctgtgctgtcagaagcgtgtccggggccggctcctaccagctcacctttgggaaggggaccaaattatcagtcattccaaatatccagaaccctgaccctgccgtgtaccagctgagagactctaaatccagtgacaagtctgtctgcctattcaccgattttgattctcaaacaaatgtgtcacaaagtaaggattctgatgtgtatatcacagacaaatgtgtgctagacatgaggtctatggacttcaagagcaacagtgctgtggcctggagcaacaaatctgactttgcatgtgcaaacgccttcaacaacagcattattccagaagacaccttcttccccagcccagaaagttcctgtgatgtcaagctggtcgagaaaagctttgaaacagatacgaacctaaactttcaaaacctgtcagttgtgatcggcatcttggtggccgtcatcctactgctcctcctcctcctcctcctcttcctcatcctccgacatcgacgtcagggcaaacactggacatcgacccagagaaaggctgatttccaacatcctgcaggggctgtggggccagagcccacagacagaggcctgcagtggaggtccagcccagctgccgatgcccaggaagaaaacctctatgctgccgtgaagcacacacagcctgaggatggggtggagatggacactcggagcccacacgatgaagacccccaggcagtgacgtatgccgaggtgaaacactccagacctaggagagaaatggcctctcctccttccccactgtctggggaattcctggacacaaaggacagacaggcggaagaggacaggcagatggacactgaggctgctgcatctgaagccccccaggatgtgacctacgcccagctgcacagcttgaccctcagacgggaggcaactgagcctcctccatcccaggaagggccct

SEQ ID NO: 197 - protein, 466 aa, Artificial Sequence
  Ftcr beta LIR1 HA-1H
MGTSLLCWMALCLLGADHADTGVSQNPRHKITKRGQNVTFRCDPISEHNRLYWYRQTLGQGPEFLTYFQNEAQLEKSRLLSDRFSAERPKGSFSTLEIQRTEQGDSAMYLCASSIDSFNEQFFGPGTRLTVLEDLKNVFPPEVAVFEPSEAEISHTQKATLVCLATGFYPDHVELSWWVNGKEVHSGVCTDPQPLKEQPALNDSRYCLSSRLRVSATFWQNPRNHFRCQVQFYGLSENDEWTQDRAKPVTQIVSAEAWGRADCGFTSESYQQGVLSVVIGILVAVILLLLLLLLLFLILRHRRQGKHWTSTQRKADFQHPAGAVGPEPTDRGLQWRSSPAADAQEENLYAAVKHTQPEDGVEMDTRSPHDEDPQAVTYAEVKHSRPRREMASPPSPLSGEFLDTKDRQAEEDRQMDTEAAASEAPQDVTYAQLHSLTLRREATEPPPSQEGPSPAVPSIYATLAIH

SEQ ID NO: 198 - DNA, 1401 bp, Artificial Sequence
  Ftcr beta LIR1 HA-1H
atgggcaccagcctcctctgctggatggccctgtgtctcctgggggcagatcacgcagatactggagtctcccagaaccccagacacaagatcacaaagaggggacagaatgtaactttcaggtgtgatccaatttctgaacacaaccgcctttattggtaccgacagaccctggggcagggcccagagtttctgacttacttccagaatgaagctcaactagaaaaatcaaggctgctcagtgatcggttctctgcagagaggcctaagggatctttctccaccttggagatccagcgcacagagcagggggactcggccatgtatctctgtgccagcagcatcgactccttcaacgagcagttcttcgggccgggcaccaggctcacggtcctcgaggacctgaaaaacgtgttcccacccgaggtcgctgtgtttgagccatcagaagcagagatctcccacacccaaaaggccacactggtgtgcctggccacaggcttctaccccgaccacgtggagctgagctggtgggtgaatgggaaggaggtgcacagtggggtctgcacagacccgcagcccctcaaggagcagcccgccctcaatgactccagatactgcctgagcagccgcctgagggtgtcggccaccttctggcagaacccccgcaaccacttccgctgtcaagtccagttctacgggctctcggagaatgacgagtggacccaggatagggccaaacctgtcacccagatcgtcagcgccgaggcctggggtagagcagactgtggcttcacctccgagtcttaccagcaaggggtcctgtctgttgtgatcggcatcttggtggccgtcatcctactgctcctcctcctcctcctcctcttcctcatcctccgacatcgacgtcagggcaaacactggacatcgacccagagaaaggctgatttccaacatcctgcaggggctgtggggccagagcccacagacagaggcctgcagtggaggtccagcccagctgccgatgcccaggaagaaaacctctatgctgccgtgaagcacacacagcctgaggatggggtggagatggacactcggagcccacacgatgaagacccccaggcagtgacgtatgccgaggtgaaacactccagacctaggagagaaatggcctctcctccttccccactgtctggggaattcctggacacaaaggacagacaggcggaagaggacaggcagatggacactgaggctgctgcatctgaagccccccaggatgtgacctacgcccagctgcacagcttgaccctcagacgggaggcaactgagcctcctccatcccaggaagggccctctccagctgtgcccagcatctacgccactctggccatccactag

SEQ ID NO: 199 - protein, 250 aa, Artificial Sequence
  HA-1H TCR alpha
MVKIRQFLLAILWLQLSCVSAAKNEVEQSPQNLTAQEGEFITINCSYSVGISALHWLQQHPGGGIVSLFMLSSGKKKHGRLIATINIQEKHSSLHITASHPRDSAVYICAVRSVSGAGSYQLTFGKGTKLSVIPNIQNPDPAVYQLRDSKSSDKSVCLFTDFDSQTNVSQSKDSDVYITDKCVLDMRSMDFKSNSAVAWSNKSDFACANAFNNSIIPEDTFFPSPESSCDVKLVEKSFETDTNLNFQNLS

SEQ ID NO: 200 - protein, 276 aa, Artificial Sequence
  HA-1H TCR beta
MGTSLLCWMALCLLGADHADTGVSQNPRHKITKRGQNVTFRCDPISEHNRLYWYRQTLGQGPEFLTYFQNEAQLEKSRLLSDRFSAERPKGSFSTLEIQRTEQGDSAMYLCASSIDSFNEQFFGPGTRLTVLEDLKNVFPPEVAVFEPSEAEISHTQKATLVCLATGFYPDHVELSWWVNGKEVHSGVCTDPQPLKEQPALNDSRYCLSSRLRVSATFWQNPRNHFRCQVQFYGLSENDEWTQDRAKPVTQIVSAEAWGRADCGFTSESYQQGVLS

SEQ ID NO: 201 - DNA, 750 bp, Artificial Sequence
  HA-1H TCR alpha
atggtgaagatccggcaatttttgttggctattttgtggcttcagctaagctgtgtaagtgccgccaaaaatgaagtggagcagagtcctcagaacctgactgcccaggaaggagaatttatcacaatcaactgcagttactcggtaggaataagtgccttacactggctgcaacagcatccaggaggaggcattgtttccttgtttatgctgagctcagggaagaagaagcatggaagattaattgccacaataaacatacaggaaaagcacagctccctgcacatcacagcctcccatcccagagactctgccgtctacatctgtgctgtcagaagcgtgtccggggccggctcctaccagctcacctttgggaaggggaccaaattatcagtcattccaaatatccagaaccctgaccctgccgtgtaccagctgagagactctaaatccagtgacaagtctgtctgcctattcaccgattttgattctcaaacaaatgtgtcacaaagtaaggattctgatgtgtatatcacagacaaatgtgtgctagacatgaggtctatggacttcaagagcaacagtgctgtggcctggagcaacaaatctgactttgcatgtgcaaacgccttcaacaacagcattattccagaagacaccttcttccccagcccagaaagttcctgtgatgtcaagctggtcgagaaaagctttgaaacagatacgaacctaaactttcaaaacctgtca

SEQ ID NO: 202 - DNA, 828 bp, Artificial Sequence
  HA-1H TCR beta
atgggcaccagcctcctctgctggatggccctgtgtctcctgggggcagatcacgcagatactggagtctcccagaaccccagacacaagatcacaaagaggggacagaatgtaactttcaggtgtgatccaatttctgaacacaaccgcctttattggtaccgacagaccctggggcagggcccagagtttctgacttacttccagaatgaagctcaactagaaaaatcaaggctgctcagtgatcggttctctgcagagaggcctaagggatctttctccaccttggagatccagcgcacagagcagggggactcggccatgtatctctgtgccagcagcatcgactccttcaacgagcagttcttcgggccgggcaccaggctcacggtcctcgaggacctgaaaaacgtgttcccacccgaggtcgctgtgtttgagccatcagaagcagagatctcccacacccaaaaggccacactggtgtgcctggccacaggcttctaccccgaccacgtggagctgagctggtgggtgaatgggaaggaggtgcacagtggggtctgcacagacccgcagcccctcaaggagcagcccgccctcaatgactccagatactgcctgagcagccgcctgagggtgtcggccaccttctggcagaacccccgcaaccacttccgctgtcaagtccagttctacgggctctcggagaatgacgagtggacccaggatagggccaaacctgtcacccagatcgtcagcgccgaggcctggggtagagcagactgtggcttcacctccgagtcttaccagcaaggggtcctgtct

SEQ ID NO: 203 - protein, 13 aa, Artificial Sequence
  NY-ESO CDR
CASSLGLGYEQYF

SEQ ID NO: 204 - protein, 20 aa, Artificial Sequence
  NY-ESO CDR
CASSLGGPRGLAGLRGDEQF

SEQ ID NO: 205 - protein, 12 aa, Artificial Sequence
  NY-ESO CDR
CASSLRRDNEQF

SEQ ID NO: 206 - protein, 19 aa, Artificial Sequence
  MAGE-A3 CDR
CASSLEVLLGADFPDTQYF

SEQ ID NO: 207 - protein, 18 aa, Artificial Sequence
  MAGE-A3 CDR
CASSFPAGHGADLDNEQF

SEQ ID NO: 208 - protein, 14 aa, Artificial Sequence
  MAGE-A3 CDR
CASSEITGRIGEQF

SEQ ID NO: 209 - protein, 18 aa, Artificial Sequence
  MAGE-A3 CDR
CASSLGGDELGADGNEQF

SEQ ID NO: 210 - protein, 241 aa, Artificial Sequence
  NY-ESO-1 ScFv
DIQMTQSPSSLSASVGDRVTITCRASQSISSYLNWYQQKPGKAPKLLIYAASSLQSGVPSRFSGSGSGTDFTLTISSLQPEDFATYYCQQSYSTPLTFGGGTKVEIKGGGGSGGGGSGGGGSGGEVQLVESGGGLVQPGGSLRLSCAASGFTVYDYMSWVRQAPGKGLEWVSVIYSGGSTYYADSVKGRFTISRDNSKNTLYLQMNSLRAEDTAVYYCARYSYYYYYMDVWGKGTTVTVSS

SEQ ID NO: 211 - DNA, 723 bp, Artificial Sequence
  NY-ESO-1 ScFv
gacatccagatgacccagtctccatcctccctgtctgcatctgtaggagacagagtcaccatcacttgccgggcaagtcagagcattagcagctatttaaattggtatcagcagaaaccagggaaagcccctaagctcctgatctatgctgcatccagtttgcaaagtggggtcccatcaaggttcagtggcagtggatctgggacagatttcactctcaccatcagcagtctgcaacctgaagattttgcaacttactactgtcaacagagttacagtacccctctcactttcggcggcggaacaaaggtggagatcaagggcggaggtggaagcggagggggaggatctggcggcggaggaagcggaggcgaagtgcagctggtggaaagcggcggaggcctggtgcagcctggcggcagcctgagactgtcttgcgccgccagcggcttcaccgtgtacgactacatgagctgggtccgccaggcccctggcaagggactggaatgggtgtccgtgatctacagcggcggcagcacctactacgccgacagcgtgaagggtcgattcaccatcagccgggacaacagcaagaacaccctgtacctgcagatgaacagcctgcgggccgaggacaccgccgtgtattactgtgcgaggtactcctactactactactacatggacgtctggggcaaagggaccacggtcaccgtgtcctca

SEQ ID NO: 212 - protein, 244 aa, Artificial Sequence
  MAGE-A3 antigen binding domain
QVQLQESGPGLVKPSDTLSLTCAVSGYSISSSNWWGWIRQPPGKGLEWIGYIYYSGSTYYNPSLKSRVTMSVDTSKNQFSLKLSSVTAVDTAVYYCARIPFGDWWYFDLWGRGTLVTVSSGGGGSGGGGSGGGGSGGDIQMTQSPSSLSASVGDRVTITCRASQSISSYLNWYQQKPGKAPKLLIYAASSLQSGVPSRFSGSGSGTDFTLTISSLQPEDFATYYCQQSYSFVLTFGGGTKVEIK

SEQ ID NO: 213 - DNA, 732 bp, Artificial Sequence
  MAGE-A3 antigen binding domain
caggtgcagctgcaggaaagcggccctggcctggtgaaacccagcgacaccctgagcctgacctgcgccgtgtccggctacagcatcagcagcagcaattggtggggctggatcagacagccccctggcaagggcctggaatggatcggctacatctactacagcggcagcacctactacaaccccagcctgaagtccagagtgaccatgagcgtggacaccagcaagaaccagttcagcctgaagctgagcagcgtgaccgccgtcgataccgctgtgtattactgtgcgagaataccctttggggattggtggtacttcgatctctggggccgtggcaccctggtcactgtgtcctcaggcggaggtggaagcggagggggaggatctggcggcggaggaagcggaggcgacatccagatgacccagagccccagcagcctgagcgccagcgtgggcgacagagtgaccatcacctgtcgggccagccagtcgatcagcagctacctgaactggtatcagcagaagcccggcaaggcccccaagctgctgatctacgccgccagctccctgcagagcggcgtgccaagcagattcagcggcagcggctccggcaccgacttcaccctgaccatcagcagcctgcagcccgaggacttcgccacctactactgccagcagagttacagtttcgttctcactttcggcggagggaccaaggtggagatcaaa

SEQ ID NO: 214 - protein, 248 aa, Artificial Sequence
  MAGE-A3 antigen binding domain
QVQLVQSGAEVKKPGASVKVSCKVSGYTLTELSMHWVRQAPGKGLEWMGGFDPEDGETIYAQKFQGRVTMTEDTSTDTAYMELSSLRSEDTAVYYCATDLYSSSWYCDAFDIWGQGTMVTVSSGGGGSGGGGSGGGGSGGDIQMTQSPSSLSASVGDRVTITCRASQSISSYLNWYQQKPGKAPKLLIYAASSLQSGVPSRFSGSGSGTDFTLTISSLQPEDFATYYCQQSWASTPLTFGGGTKVEIK

SEQ ID NO: 215 - DNA, 744 bp, Artificial Sequence
  MAGE-A3 antigen binding domain
caggtgcagctggtgcagtctggcgccgaagtgaagaaacctggcgcctccgtgaaggtgtcctgcaaggtgtccggctacaccctgaccgagctgtcgatgcactgggtccgccaggcacctggcaagggactggaatggatgggcggctttgaccccgaggacggcgagacaatctacgcccagaaattccagggcagagtgaccatgaccgaggacaccagcaccgacaccgcctacatggaactgagcagcctgcggagcgaggacaccgctgtgtattactgtgcaacagatctgtatagcagcagctggtactgtgatgcttttgatatctggggccaagggacaatggtcaccgtgtcctcaggcggaggtggaagcggagggggaggatctggcggcggaggaagcggaggcgacatccagatgacccagagccccagcagcctgagcgccagcgtgggcgacagagtgaccatcacctgtcgggccagccagtcgatcagcagctacctgaactggtatcagcagaagcccggcaaggcccccaagctgctgatctacgccgccagctccctgcagagcggcgtgccaagcagattcagcggcagcggctccggcaccgacttcaccctgaccatcagcagcctgcagcccgaggacttcgccacctactactgccagcagagttgggccagcacccctctcactttcggcggagggaccaaggtggagatcaaa

SEQ ID NO: 216 - protein, 245 aa, Artificial Sequence
  HPV E6 antigen binding domain
EVQLVESGGGLVQPGGSLRLSCAASGFTFSSYWMHWVRQAPGKGLVWVSRINSDGSSTSYADSVKGRFTISRDNAKNTLYLQMNSLRAEDTAVYYCARENGVVKWYFDLWGRGTLVTVSSGGGGSGGGGSGGGGSGGDIQMTQSPSSLSASVGDRVTITCRASQSISSYLNWYQQKPGKAPKLLIYAASSLQSGVPSRFSGSGSGTDFTLTISSLQPEDFATYYCQQSYSTPLFPFGGGTKVEIK

SEQ ID NO: 217 - DNA, 735 bp, Artificial Sequence
  HPV E6 antigen binding domain
gaagtgcagctggtggaaagcggcggaggcctggtgcagcctggcggcagcctgagactgtcttgcgccgccagcggcttcaccttcagcagctactggatgcactgggtccgccaggcccctggcaagggactggtctgggtgtctcgaatcaacagcgacggcagcagcaccagctacgccgacagcgtgaagggccggttcaccatcagccgggacaacgccaagaacaccctgtacctgcagatgaacagcctgcgggccgaggacaccgccgtgtattactgtgccagggagaacggcgtggtgaagtggtacttcgacctgtggggccgtggcaccctggtcactgtgtcctcaggcggaggtggaagcggagggggaggatctggcggcggaggaagcggaggcgacatccagatgacccagagccccagcagcctgagcgccagcgtgggcgacagagtgaccatcacctgtcgggccagccagtcgatcagcagctacctgaactggtatcagcagaagcccggcaaggcccccaagctgctgatctacgccgccagctccctgcagagcggcgtgccaagcagattcagcggcagcggctccggcaccgacttcaccctgaccatcagcagcctgcagcccgaggacttcgccacctactactgccagcagagttacagtacccctctctttcccttcggcggagggaccaaggtggagatcaaa

SEQ ID NO: 218 - protein, 247 aa, Artificial Sequence
  HPV E6 antigen binding domain
EVQLVESGGGLVQPGRSLRLSCAASGFTFDDYAMHWVRQAPGKGLEWVSGISWNSGSIGYADSVKGRFTISRDNAKNSLYLQMNSLRAEDTALYYCAKDGRGSPFYGGAFDIWGQGTMVTVSSGGGGSGGGGSGGGGSGGDIQMTQSPSSLSASVGDRVTITCRASQSISSYLNWYQQKPGKAPKLLIYAASSLQSGVPSRFSGSGSGTDFTLTISSLQPEDFATYYCQQSYSTPLTFGGGTKVEIK

SEQ ID NO: 219 - DNA, 741 bp, Artificial Sequence
  HPV E6 antigen binding domain
gaagtgcagctggtggaaagcggcggaggcctggtgcagcccggtcgaagcctgagactgagctgcgccgccagcggcttcacctttgacgactacgccatgcactgggtccgccaggcccctggcaagggactggaatgggtgtccggcatcagctggaacagcggcagcatcggctacgccgacagcgtgaagggccggttcaccatcagccgggacaacgccaagaacagcctgtacctgcagatgaacagcctgcgggccgaggacaccgccttgtattactgtgccaaggacggcaggggctcccccttctacggcggcgccttcgacatctggggccaagggacaatggtcaccgtgtcctcaggcggaggtggaagcggagggggaggatctggcggcggaggaagcggaggcgacatccagatgacccagtctccatcctccctgtctgcatctgtaggagacagagtcaccatcacttgccgggcaagtcagagcattagcagctatttaaattggtatcagcagaaaccagggaaagcccctaagctcctgatctatgctgcatccagtttgcaaagtggggtcccatcaaggttcagtggcagtggatctgggacagatttcactctcaccatcagcagtctgcaacctgaagattttgcaacttactactgtcaacagagttacagtacccctctcactttcggcggcggaacaaaggtggagatcaag

SEQ ID NO: 220 - protein, 251 aa, Artificial Sequence
  HPV E7 antigen binding domain
EVQLVESGGGLVKPGGSLRLSCAASGFTFSNAWMSWVRQAPGKGLEWVGRIKSKTDGGTTDYAAPVKGRFTISRDDSKNTLYLQMNSLKTEDTAVYYCTTSYDYLLNPYRWNWFDPWGQGTLVTVSSGGGGSGGGGSGGGGSGGDIQMTQSPSSLSASVGDRVTITCRASQSISSYLNWYQQKPGKAPKLLIYAASSLQSGVPSRFSGSGSGTDFTLTISSLQPEDFATYYCQQSYSTPLTFGGGTKVEIK

SEQ ID NO: 221 - DNA, 753 bp, Artificial Sequence
  HPV E7 antigen binding domain
gaagtgcagctggtggaaagcggcggaggcctggtgaaacctggcggcagcctgagactgagctgcgccgccagcggcttcaccttctcgaacgcctggatgagctgggtccgccaggcccctggcaagggactggaatgggtcggacggatcaagagcaagaccgacggcggcaccaccgactacgctgcccccgtgaagggccggttcaccatcagccgggacgacagcaagaacaccctgtacctgcagatgaacagcctgaaaaccgaggacaccgccgtgtattactgtaccacctcctacgattaccttctcaatccttatcgttggaactggttcgacccctggggccagggaaccctggtcaccgtgtcctcaggcggaggtggaagcggagggggaggatctggcggcggaggaagcggcggagacatccagatgacccagtctccatcctccctgtctgcatctgtaggagacagagtcaccatcacttgccgggcaagtcagagcattagcagctatttaaattggtatcagcagaaaccagggaaagcccctaagctcctgatctatgctgcatccagtttgcaaagtggggtcccatcaaggttcagtggcagtggatctgggacagatttcactctcaccatcagcagtctgcaacctgaagattttgcaacttactactgtcaacagagttacagtacccctctcactttcggcggcggaacaaaggtggagatcaag

SEQ ID NO: 222 - protein, 246 aa, Artificial Sequence
  MAGE-A3 antigen binding domain
QVQLVQSGAEVKKPGSSVKVSCKASGGTFSSYAISWVRQAPGQGLEWMGGIIPIFGTANYAQKFQGRVTITADESTSTAYMELSSLRSEDTAVYYCARDMDTFSMVTLFDYWGQGTLVTVSSGGGGSGGGGSGGGGSGGDIQMTQSPSSLSASVGDRVTITCRASQSISSYLNWYQQKPGKAPKLLIYAASSLQSGVPSRFSGSGSGTDFTLTISSLQPEDFATYYCQQSYSWPLTFGGGTKVEIK

SEQ ID NO: 223 - DNA, 738 bp, Artificial Sequence
  MAGE-A3 antigen binding domain
caggtgcagctggtgcagtctggcgccgaagtgaagaaacccggcagcagcgtgaaggtgtcctgcaaggccagcggcggcaccttcagcagctacgccatcagctgggtccgccaggctcctggacagggactggaatggatgggcggcatcatccccatcttcggcaccgccaactacgcccagaaattccagggcagagtgaccatcaccgccgacgagagcaccagcaccgcctacatggaactgagcagccttcgaagcgaggacaccgctgtgtattactgtgccagggacatggacaccttctccatggtgaccctgttcgactactggggccagggcaccctggtcaccgtgtcctcaggcggaggtggaagcggagggggaggatctggcggcggaggaagcggaggcgacatccagatgacccagagccccagcagcctgagcgccagcgtgggcgacagagtgaccatcacctgtcgggccagccagtcgatcagcagctacctgaactggtatcagcagaagcccggcaaggcccccaagctgctgatctacgccgccagctccctgcagagcggcgtgccaagcagattcagcggcagcggctccggcaccgacttcaccctgaccatcagcagcctgcagcccgaggacttcgccacctactactgccagcagagttacagttggcctctcactttcggcggagggaccaaggtggagatcaaa

SEQ ID NO: 224 - protein, 245 aa, Artificial Sequence
  KRAS G12V antigen binding domain
QVTLRESGPALVKPTQTLTLTCTFSGFSLSTSGMCVSWIRQPPGKALEWLALIDWDDDKYYSTSLKTRLTISKDTSKNQVVLTMTNMDPVDTATYYCARSYDELYYFDYWGQGTLVTVSSGGGGSGGGGSGGGGSGGDIQMTQSPSSLSASVGDRVTITCRASQSIWTSYLNWYQQKPGKAPKLLIYAASSLQSGVPSRFSGSGSGTDFTLTISSLQPEDFATYYCQQSYSTPLTFGGGTKVEIK

SEQ ID NO: 225 - DNA, 735 bp, Artificial Sequence
  KRAS G12V antigen binding domain
caggtcacactgagagagtccggccctgccctggtgaaacccacccagaccctgaccctgacatgcaccttcagcggcttcagcctgagcaccagcgggatgtgcgtgtcctggattcgacagccccctggcaaggccctggaatggctggccctgattgactgggacgacgacaagtactacagcaccagcctgaaaacccggctgaccatcagcaaggacaccagcaagaaccaggtggtgctgaccatgaccaacatggaccccgtggacaccgccacgtattactgtgcacggagttacgacgagctctactactttgactactggggccagggaaccctggtcaccgtgtcctcaggcggaggtggaagcggagggggaggatctggcggcggaggaagcggaggcgacatccagatgacccagagccccagctccctctctgcatctgtgggcgacagagtgaccatcacctgtcgggccagccagtcgatctggaccagctacctgaactggtatcagcagaagcccggcaaggcccccaagctgctgatctacgccgccagctccctgcagagcggcgtgccaagcagattcagcggcagcggctccggcaccgacttcaccctgaccatcagcagcctgcagcccgaggacttcgccacctactactgccagcagagttacagtacccctctcactttcggcggagggaccaaggtggagatcaaa

SEQ ID NO: 226 - protein, 5 aa, Artificial Sequence
  linker
GGGGS

SEQ ID NO: 227 - protein, 10 aa, Artificial Sequence
  linker
GGGGSGGGGS

SEQ ID NO: 228 - protein, 15 aa, Artificial Sequence
  linker
GGGGSGGGGSGGGGS

SEQ ID NO: 229 - protein, 15 aa, Artificial Sequence
  linker
GGGGSGGGGSGGGGS

SEQ ID NO: 230 - protein, 20 aa, Artificial Sequence
  linker
GGGGSGGGGSGGGGSGGGGS

SEQ ID NO: 231 - protein, 4 aa, Artificial Sequence
  linker
GGGS

SEQ ID NO: 232 - protein, 247 aa, Artificial Sequence
  KRAS ScFv
QVQLVESGGGLVKPGGSLRLSCAASGFTFSDYYMSWIRQAPGKGLEWVSYISSSGSTIYYADSVKGRFTISRDNAKNSLYLQMNSLRAEDTAVYYCARDFTRDYYYYYYMDVWGKGTTVTVSSGGGGSGGGGSGGGGSGGDIQMTQSPSSLSASVGDRVTITCRASQSISSYLNWYQQKPGKAPKLLIYAASSLQSGVPSRFSGSGSGTDFTLTISSLQPEDFATYYCQQSYSTPLTFGGGTKVEIK

SEQ ID NO: 233 - DNA, 741 bp, Artificial Sequence
  KRAS ScFv
caggtgcagctggtggaaagcggcggaggcctggtgaaacctggcggcagcctgagactgagctgcgccgccagcggcttcaccttcagcgactactacatgagctggatcagacaggcccctggcaagggactggaatgggtgtcctacatcagcagcagcggctcgaccatctactacgccgacagcgtgaagggccggttcaccatcagccgggacaacgccaagaacagcctgtacctgcagatgaacagcctgcgggccgaggacaccgccgtgtattactgtgccagggacttcaccagggactactactactactactacatggacgtgtggggcaaagggaccacggtcaccgtgtcctcaggcggaggtggaagcggagggggaggatctggcggcggaggaagcggaggcgacatccagatgacccagtctccatcctccctgtctgcatctgtaggagacagagtcaccatcacttgccgggcaagtcagagcattagcagctatttaaattggtatcagcagaaaccagggaaagcccctaagctcctgatctatgctgcatccagtttgcaaagtggggtcccatcaaggttcagtggcagtggatctgggacagatttcactctcaccatcagcagtctgcaacctgaagattttgcaacttactactgtcaacagagttacagtacccctctcactttcggcggcggaacaaaggtggagatcaag

SEQ ID NO: 234 - protein, 244 aa, Artificial Sequence
  KRAS ScFv
QVTLRESGPALVKPTQTLTLTCTFSGFSLSTSGMCVSWIRQPPGKALEWLALIDWDDDKYYSTSLKTRLTISKDTSKNQVVLTMTNMDPVDTATYYCARSYDELYYFDYWGQGTLVTVSSGGGGSGGGGSGGGGSGGDIQMTQSPSSLSASVGDRVTITCRASQSISSYLNWYQQKPGKAPKLLIYAASSLQSGVPSRFSGSGSGTDFTLTISSLQPEDFATYYCQQSYSTPLTFGGGTKVEIK

SEQ ID NO: 235 - DNA, 732 bp, Artificial Sequence
  KRAS ScFv
caggtcacactgagagagtccggccctgccctggtgaaacccacccagaccctgaccctgacatgcaccttcagcggcttcagcctgagcaccagcgggatgtgcgtgtcctggattcgacagccccctggcaaggccctggaatggctggccctgattgactgggacgacgacaagtactacagcaccagcctgaaaacccggctgaccatcagcaaggacaccagcaagaaccaggtggtgctgaccatgaccaacatggaccccgtggacaccgccacgtattactgtgcacggagttacgacgagctctactactttgactactggggccagggaaccctggtcaccgtgtcctcaggcggaggtggaagcggagggggaggatctggcggcggaggaagcggaggcgacatccagatgacccagtctccatcctccctgtctgcatctgtaggagacagagtcaccatcacttgccgggcaagtcagagcattagcagctatttaaattggtatcagcagaaaccagggaaagcccctaagctcctgatctatgctgcatccagtttgcaaagtggggtcccatcaaggttcagtggcagtggatctgggacagatttcactctcaccatcagcagtctgcaacctgaagattttgcaacttactactgtcaacagagttacagtacccctctcactttcggcggcggaacaaaggtggagatcaag

SEQ ID NO: 236 - protein, 245 aa, Artificial Sequence; identical to SEQ ID NO: 224
  KRAS ScFv

SEQ ID NO: 237 - DNA, 735 bp, Artificial Sequence; identical to SEQ ID NO: 225
  KRAS ScFv

SEQ ID NO: 238 - protein, 244 aa, Artificial Sequence
  KRAS ScFv
QVTLRESGPALVKPTQTLTLTCTFSGFSLSTSGMCVSWIRQPPGKALEWLALIDWDDDKYYSTSLKTRLTISKDTSKNQVVLTMTNMDPVDTATYYCARSYDELYYFDYWGQGTLVTVSSGGGGSGGGGSGGGGSGGDIQMTQSPSSLSASVGDRVTITCRASQSISSYLNWYQQKPGKAPKLLIYAASSLQSGVPSRFSGSGSGTDFTLTISSLQPEDFATYYCQQSYSTRLTFGGGTKVEIK

SEQ ID NO: 239 - DNA, 732 bp, Artificial Sequence
  KRAS ScFv
caggtcacactgagagagtccggccctgccctggtgaaacccacccagaccctgaccctgacatgcaccttcagcggcttcagcctgagcaccagcgggatgtgcgtgtcctggattcgacagccccctggcaaggccctggaatggctggccctgattgactgggacgacgacaagtactacagcaccagcctgaaaacccggctgaccatcagcaaggacaccagcaagaaccaggtggtgctgaccatgaccaacatggaccccgtggacaccgccacgtattactgtgcacggagttacgacgagctctactactttgactactggggccagggaaccctggtcaccgtgtcctcaggcggaggtggaagcggagggggaggatctggcggcggaggaagcggaggcgacatccagatgacccagagccccagctccctctctgcatctgtgggcgacagagtgaccatcacctgtcgggccagccagtcgatcagcagctacctgaactggtatcagcagaagcccggcaaggcccccaagctgctgatctacgccgccagctccctgcagagcggcgtgccaagcagattcagcggcagcggctccggcaccgacttcaccctgaccatcagcagcctgcagcccgaggacttcgccacctactactgccagcagagttacagtacccggctcactttcggcggagggaccaaggtggagatcaaa

SEQ ID NO: 240 - protein, 244 aa, Artificial Sequence
  KRAS TCR alpha
MQRNLGAVLGILWVQICWVRGDQVEQSPSALSLHEGTDSALRCNFTTTMRSVQWFRQNSRGSLISLFYLASGTKENGRLKSAFDSKERRYSTLHIRDAQLEDSGTYFCAADSSNTGYQNFYFGKGTSLTVIPNIQNPEPAVYQLKDPRSQDSTLCLFTDFDSQINVPKTMESGTFITDKCVLDMKAMDSKSNGAIAWSNQTSFTCQDIFKETNATYPSSDVPCDATLTEKSFETDMNLNFQNLS

SEQ ID NO: 241 - DNA, 732 bp, Artificial Sequence
  KRAS TCR alpha
atgcagaggaacctgggagctgtgctggggattctgtgggtgcagatttgctgggtgagaggggatcaggtggagcagagtccttcagccctgagcctccacgagggaaccgattctgctctgagatgcaattttacgaccaccatgaggagtgtgcagtggttccgacagaattccaggggcagcctcatcagtttgttctacttggcttcaggaacaaaggagaatgggaggctaaagtcagcatttgattctaaggagcggcgctacagcaccctgcacatcagggatgcccagctggaggactcaggcacttacttctgtgctgctgactcttcgaacacgggttaccagaacttctattttgggaaaggaacaagtttgactgtcattccaaacatccagaacccagaacctgctgtgtaccagttaaaagatcctcggtctcaggacagcaccctctgcctgttcaccgactttgactcccaaatcaatgtgccgaaaaccatggaatctggaacgttcatcactgacaaatgtgtgctggacatgaaagctatggattccaagagcaatggggccattgcctggagcaaccagacaagcttcacctgccaagatatcttcaaagagaccaacgccacctaccccagttcagacgttccctgtgatgccacgttgaccgagaaaagctttgaaacagatatgaacctgaactttcaaaacctgtct

SEQ ID NO: 242 - protein, 283 aa, Artificial Sequence
  KRAS TCR beta
MSNTAFPDPAWNTTLLSWVALFLLGTSSANSGVVQSPRYIIKGKGERSILKCIPISGHLSVAWYQQTQGQELKFFIQHYDKMERDKGNLPSRFSVQQFDDYHSEMNMSALELEDSAVYFCASSLTDPLDSDYTFGSGTRLLVIEDLRNVTPPKVSLFEPSKAEIANKQKATLVCLARGFFPDHVELSWWVNGKEVHSGVCTDPQAYKESNYSYCLSSRLRVSATFWHNPRNHFRCQVQFHGLSEEDKWPEGSPKPVTQNISAEAWGRADCGITSASYQQGVLS

SEQ ID NO: 243 - DNA, 849 bp, Artificial Sequence
  KRAS TCR beta
atgtctaacactgccttccctgaccccgcctggaacaccaccctgctatcttgggttgctctctttctcctgggaacaagttcagcaaattctggggttgtccagtctccaagatacataatcaaaggaaagggagaaaggtccattctaaaatgtattcccatctctggacatctctctgtggcctggtatcaacagactcaggggcaggaactaaagttcttcattcagcattatgataaaatggagagagataaaggaaacctgcccagcagattctcagtccaacagtttgatgactatcactctgagatgaacatgagtgccttggagctagaggactctgccgtgtacttctgtgccagctctctcacagatccgctagactccgactacaccttcggctcagggaccaggcttttggtaatagaggatctgagaaatgtgactccacccaaggtctccttgtttgagccatcaaaagcagagattgcaaacaaacaaaaggctaccctcgtgtgcttggccaggggcttcttccctgaccacgtggagctgagctggtgggtgaatggcaaggaggtccacagtggggtctgcacggaccctcaggcctacaaggagagcaattatagctactgcctgagcagccgcctgagggtctctgctaccttctggcacaatcctcgcaaccacttccgctgccaagtgcagttccatgggctttcagaggaggacaagtggccagagggctcacccaaacctgtcacacagaacatcagtgcagaggcctggggccgagcagactgtgggattacctcagcatcctatcaacaaggggtcttgtct

SEQ ID NO: 244 - protein, 283 aa, Artificial Sequence; identical to SEQ ID NO: 242
  KRAS TCR beta

SEQ ID NO: 245 - DNA, 849 bp, Artificial Sequence; identical to SEQ ID NO: 243
  KRAS TCR beta

SEQ ID NO: 246 - protein, 248 aa, Artificial Sequence
  KRAS TCRa
MKTVTGPLFLCFWLQLNCVSRGEQVEQRPPHLSVREGDSAVITCTYTDPNSYYFFWYKQEPGASLQLLMKVFSSTEINEGQGFTVLLNKKDKRLSLNLTAAHPGDSAAYFCAVSGGTNSAGNKLTFGIGTRVLVRPDIQNPEPAVYQLKDPRSQDSTLCLFTDFDSQINVPKTMESGTFITDKCVLDMKAMDSKSNGAIAWSNQTSFTCQDIFKETNATYPSSDVPCDATLTEKSFETDMNLNFQNLS

SEQ ID NO: 247 - DNA, 744 bp, Artificial Sequence
  KRAS TCRa
atgaagacggtgactggacctttgttcctgtgcttctggctgcagctgaactgtgtgagcagaggcgagcaggtggagcagcgccctcctcacctgagtgtccgggagggagacagtgccgttatcacctgcacctacacagaccctaacagttattacttcttctggtacaagcaagagccgggggcaagtcttcagttgcttatgaaggttttctcaagtacggaaataaacgaaggacaaggattcactgtcctactgaacaagaaagacaaacgactctctctgaacctcacagctgcccatcctggggactcagccgcgtacttctgcgcagtcagtggagggactaacagtgcagggaacaagctaacttttggaattggaaccagggtgctggtcaggccagacatccagaacccagaacctgctgtgtaccagttaaaagatcctcggtctcaggacagcaccctctgcctgttcaccgactttgactcccaaatcaatgtgccgaaaaccatggaatctggaacgttcatcactgacaaatgtgtgctggacatgaaagctatggattccaagagcaatggggccattgcctggagcaaccagacaagcttcacctgccaagatatcttcaaagagaccaacgccacctaccccagttcagacgttccctgtgatgccacgttgaccgagaaaagctttgaaacagatatgaacctgaactttcaaaacctgtct

SEQ ID NO: 248 - protein, 272 aa, Artificial Sequence
  KRAS TCRb
MGCRLLSCVAFCLLGIGPLETAVFQTPNYHVTQVGNEVSFNCKQTLGHDTMYWYKQDSKKLLKIMFSYNNKQLIVNETVPRRFSPQSSDKAHLNLRIKSVEPEDSAVYLCASSRDWGPAEQFFGPGTRLTVLEDLRNVTPPKVSLFEPSKAEIANKQKATLVCLARGFFPDHVELSWWVNGKEVHSGVCTDPQAYKESNYSYCLSSRLRVSATFWHNPRNHFRCQVQFHGLSEEDKWPEGSPKPVTQNISAEAWGRADCGITSASYHQGVLS

SEQ ID NO: 249 - DNA, 816 bp, Artificial Sequence
  KRAS TCRb
atgggctgtaggctcctaagctgtgtggccttctgcctcttgggaataggccctttggagacagctgttttccagactccaaactatcatgtcacacaggtgggaaatgaagtgtctttcaattgtaagcaaactctgggccacgatactatgtattggtacaagcaagactctaagaaattgctgaagattatgtttagctacaataataagcaactcattgtaaacgaaacagttccaaggcgcttctcacctcagtcttcagataaagctcatttgaatcttcgaatcaagtctgtagagccggaggactctgctgtgtatctctgtgccagcagtcgggactgggggcctgctgagcagttcttcggaccagggacacgactcaccgtcctagaggatctgagaaatgtgactccacccaaggtctccttgtttgagccatcaaaagcagagattgcaaacaaacaaaaggctaccctcgtgtgcttggccaggggcttcttccctgaccacgtggagctgagctggtgggtgaatggcaaggaggtccacagtggggtctgcacggaccctcaggcctacaaggagagcaattatagctactgcctgagcagccgcctgagggtctctgctaccttctggcacaatcctcgaaaccacttccgctgccaagtgcagttccatgggctttcagaggaggacaagtggccagagggctcacccaaacctgtcacacagaacatcagtgcagaggcctggggccgagcagactgtggaatcacttcagcatcctatcatcagggggttctgtct

SEQ ID NO: 250 - protein, 272 aa, Artificial Sequence; identical to SEQ ID NO: 248
  KRAS TCRb

SEQ ID NO: 251 - DNA, 816 bp, Artificial Sequence; identical to SEQ ID NO: 249
  KRAS TCRb

SEQ ID NO: 252 - protein, 244 aa, Artificial Sequence; identical to SEQ ID NO: 240
  TCRa control

SEQ ID NO: 253 - DNA, 732 bp, Artificial Sequence; identical to SEQ ID NO: 241
  TCRa control

SEQ ID NO: 254 - protein, 248 aa, Artificial Sequence; identical to SEQ ID NO: 246
  TCRa control

SEQ ID NO: 255 - DNA, 744 bp, Artificial Sequence; identical to SEQ ID NO: 247
  TCRa control

SEQ ID NO: 256 - protein, 9 aa, Artificial Sequence
  mH-Y-2Db peptide
KCSRNRQYL

SEQ ID NO: 257 - protein, 614 aa, Artificial Sequence
  H-Y TCR alpha and beta
MFPVTILLLSAFFSLRGNSAQSVDQPDAHVTLSEGASLELRCSYSYSAAPYLFWYVQYPGQSLQFLLKYITGDTVVKGTKGFEAEFRKSNSSFNLKKSPAHWSDSAKYFCALEGQDQGGSAKLIFGEGTKLTVSSPDIQNPEPAVYQLKDPRSQDSTLCLFTDFDSQINVPKTMESGTFITDKTVLDMKAMDSKSNGAIAWSNQTSFTCQDIFKETNATYPSSDVPCDATLTEKSFETDMNLNFQNLSVMGLRILLLKVAGFNLLMTLRLWSSRAKRSGSGATNFSLLKQAGDVEENPGPMSNTAFPDPAWNTTLLSWVALFLLGTKHMEAAVTQSPRNKVAVTGGKVTLSCNQTNNHNNMYWYRQDTGHGLRLIHYSYGAGSTEKGDIPDGYKASRPSQENFSLILELATPSQTSVYFCASGDNSAETLYFGPGTRLTVLEDLRNVTPPKVSLFEPSKAEIANKQKATLVCLARGFFPDHVELSWWVNGKEVHSGVSTDPQAYKESNYSYCLSSRLRVSATFWHNPRNHFRCQVQFHGLSEEDKWPEGSPKPVTQNISAEAWGRADCGITSASYHQGVLSATILYEILLGKATLYAVLVSGLVLMAMVKKKNS

SEQ ID NO: 258 - DNA, 1845 bp, Artificial Sequence
  H-Y TCR alpha and beta
atgttccccgttaccatattgctcctgagtgctttcttcagtttgcgagggaactctgcccaatctgtcgatcagccagatgcacacgttaccctttccgagggtgcgtcacttgaactgaggtgttcctatagctactcagcagccccttatctgttttggtacgtacaatacccagggcagagtctccaatttctccttaaatatataaccggggacactgtagtgaaggggactaaaggttttgaagcagagtttaggaagagcaacagctccttcaaccttaagaagtcacccgcacactggtcagactccgcgaaatacttctgtgctctggaagggcaagaccagggtggaagtgccaaattgatatttggtgagggtactaaattgactgttagctcaccagacatccagaacccagaacctgctgtgtaccagttaaaagatcctcggtctcaggacagcaccctctgcctgttcaccgactttgactcccaaatcaatgtgccgaaaaccatggaatctggaacgttcatcactgacaaaactgtgctggacatgaaagctatggattccaagagcaatggggccattgcctggagcaaccagacaagcttcacctgccaagatatcttcaaagagaccaacgccacctaccccagttcagacgttccctgtgatgccacgttgaccgagaaaagctttgaaacagatatgaacctaaactttcaaaacctgtcagttatgggactccgaatcctcctgctgaaagtagcgggatttaacctgctcatgacgctgaggctgtggtccagtcgggccaagcggtccggatccggagccaccaacttcagcctgctgaagcaggccggcgacgtggaggagaaccccggccccatgtctaatactgcatttccagatccggcctggaatactacactccttagttgggttgccctcttcctccttggcacgaagcacatggaagccgccgtcacccagagtccgagaaacaaagtagcggtcaccggcggtaaggtaacattgagttgtaaccaaacgaacaaccataacaatatgtactggtatagacaagacacaggccatggcttgcgcctgattcactacagctatggagcggggagtacggagaagggtgatattcccgatggctataaagcctctcggcctagccaggagaattttagtttgatcctggagctcgcaacccccagtcagactagcgtctacttttgtgcctcaggcgacaatagtgcggaaaccctttacttcggccctgggacaagacttacagttctagaggatctgagaaatgtgactccacccaaggtctccttgtttgagccatcaaaagcagagattgcaaacaaacaaaaggctaccctcgtgtgcttggccaggggcttcttccctgaccacgtggagctgagctggtgggtgaatggcaaggaggtccacagtggggtcagcacggaccctcaggcctacaaggagagcaattatagctactgcctgagcagccgcctgagggtctctgctaccttctggcacaatcctcgaaaccacttccgctgccaagtgcagttccatgggctttcagaggaggacaagtggccagagggctcacccaaacctgtcacacagaacatcagtgcagaggcctggggccgagcagactgtggaatcacttcagcatcctatcatcagggggttctgtctgcaaccatcctctatgagatcctactggggaaggccaccctatatgctgtgctggtcagtggcctggtgctgatggccatggtcaagaaaaaaaattcctag

SEQ ID NO: 259 - protein, 619 aa, Artificial Sequence
  H-Y TCR alpha and beta
MFPVTILLLSAFFSLRGNSAQSVDQPDAHVTLSEGASLELRCSYSYSAAPYLFWYVQYPGQSLQFLLKYITGDTVVKGTKGFEAEFRKSNSSFNLKKSPAHWSDSAKYFCALEGQDQGGSAKLIFGEGTKLTVSSPYIQNPDPAVYQLRDSKSSDKSVCLFTDFDSQTNVSQSKDSDVYITDKCVLDMRSMDFKSNSAVAWSNKSDFACANAFNNSIIPEDTFFPSPESSCDVKLVEKSFETDTNLNFQNLSVIGFRILLLKVAGFNLLMTLRLWSSGSGATNFSLLKQAGDVEENPGPMSNTAFPDPAWNTTLLSWVALFLLGTKHMEAAVTQSPRNKVAVTGGKVTLSCNQTNNHNNMYWYRQDTGHGLRLIHYSYGAGSTEKGDIPDGYKASRPSQENFSLILELATPSQTSVYFCASGDNSAETLYFGPGTRLTVLEDLKNVFPPEVAVFEPSEAEISHTQKATLVCLATGFYPDHVELSWWVNGKEVHSGVCTDPQPLKEQPALNDSRYCLSSRLRVSATFWQNPRNHFRCQVQFYGLSENDEWTQDRAKPVTQIVSAEAWGRADCGFTSESYQQGVLSATILYEILLGKATLYAVLVSALVLMAMVKRKDSRG

SEQ ID NO: 260 - DNA, 1860 bp, Artificial Sequence
  H-Y TCR alpha and beta
atgttccccgttaccatattgctcctgagtgctttcttcagtttgcgagggaactctgcccaatctgtcgatcagccagatgcacacgttaccctttccgagggtgcgtcacttgaactgaggtgttcctatagctactcagcagccccttatctgttttggtacgtacaatacccagggcagagtctccaatttctccttaaatatataaccggggacactgtagtgaaggggactaaaggttttgaagcagagtttaggaagagcaacagctccttcaaccttaagaagtcacccgcacactggtcagactccgcgaaatacttctgtgctctggaagggcaagaccagggtggaagtgccaaattgatatttggtgagggtactaaattgactgttagctcaccgtatatccagaaccctgaccctgccgtgtaccagctgagagactctaaatccagtgacaagtctgtctgcctattcaccgattttgattctcaaacaaatgtgtcacaaagtaaggattctgatgtgtatatcacagacaaatgtgtgctagacatgaggtctatggacttcaagagcaacagtgctgtggcctggagcaacaaatctgactttgcatgtgcaaacgccttcaacaacagcattattccagaagacaccttcttccccagcccagaaagttcctgtgatgtcaagctggtcgagaaaagctttgaaacagatacgaacctaaactttcaaaacctgtcagtgattgggttccgaatcctcctcctgaaagtggccgggtttaatctgctcatgacgctgcggctgtggtccagcggatccggagccaccaacttcagcctgctgaagcaggccggcgacgtggaggagaaccccggccccatgtctaatactgcatttccagatccggcctggaatactacactccttagttgggttgccctcttcctccttggcacgaagcacatggaagccgccgtcacccagagtccgagaaacaaagtagcggtcaccggcggtaaggtaacattgagttgtaaccaaacgaacaaccataacaatatgtactggtatagacaagacacaggccatggcttgcgcctgattcactacagctatggagcggggagtacggagaagggtgatattcccgatggctataaagcctctcggcctagccaggagaattttagtttgatcctggagctcgcaacccccagtcagactagcgtctacttttgtgcctcaggcgacaatagtgcggaaaccctttacttcggccctgggacaagacttacagttctggaggacctgaaaaacgtgttcccacccgaggtcgctgtgtttgagccatcagaagcagagatctcccacacccaaaaggccacactggtgtgcctggccacaggcttctaccccgaccacgtggagctgagctggtgggtgaatgggaaggaggtgcacagtggggtctgcacagacccgcagcccctcaaggagcagcccgccctcaatgactccagatactgcctgagcagccgcctgagggtgtcggccaccttctggcagaacccccgcaaccacttccgctgtcaagtccagttctacgggctctcggagaatgacgagtggacccaggatagggccaaacctgtcacccagatcgtcagcgccgaggcctggggtagagcagactgtggcttcacctccgagtcttaccagcaaggggtcctgtctgccaccatcctctatgagatcttgctagggaaggccaccttgtatgccgtgctggtcagtgccctcgtgctgatggccatggtcaagagaaaggattccagaggctag

SEQ ID NO: 261 - protein, 614 aa, Artificial Sequence
  H-Y TCR alpha and beta
MFPVTILLLSAFFSLRGNSAQSVDQPDAHVTLSEGASLELRCSYSYSAAPYLFWYVQYPGQSLQFLLKYITGDTVVKGTKGFEAEFRKSNSSFNLKKSPAHWSDSAKYFCALEGQDQGGSAKLIFGEGTKLTVSSPDIQNPEPAVYQLKDPRSQDSTLCLFTDFDSQINVPKTMESGTFITDKTVLDMKAMDSKSNGAIAWSNQTSFTCQDIFKETNATYPSSDVPCDATLTEKSFETDMNLNFQNLSVMGLRILLLKVAGFNLLMTLRLWSSRAKRSGSGATNFSLLKQAGDVEENPGPMSNTAFPDPAWNTTLLSWVALFLLGTKHMEAAVTQSPRNKVAVTGGKVTLSCNQTNNHNNMYWYRQDTGHGLRLIHYSYGAGSTEKGDIPDGYKASRPSQENFSLILELATPSQTSVYFCASGDNSAETLYFGPGTRLLVLEDLRNVTPPKVSLFEPSKAEIANKQKATLVCLARGFFPDHVELSWWVNGKEVHSGVSTDPQAYKESNYSYCLSSRLRVSATFWHNPRNHFRCQVQFHGLSEEDKWPEGSPKPVTQNISAEAWGRADCGITSASYHQGVLSATILYEILLGKATLYAVLVSGLVLMAMVKKKNS

SEQ ID NO: 262 - DNA, 1845 bp, Artificial Sequence
  H-Y TCR alpha and beta
atgttccccgttaccatattgctcctgagtgctttcttcagtttgcgagggaactctgcccaatctgtcgatcagccagatgcacacgttaccctttccgagggtgcgtcacttgaactgaggtgttcctatagctactcagcagccccttatctgttttggtacgtacaatacccagggcagagtctccaatttctccttaaatatataaccggggacactgtagtgaaggggactaaaggttttgaagcagagtttaggaagagcaacagctccttcaaccttaagaagtcacccgcacactggtcagactccgcgaaatacttctgtgctctggaagggcaagaccagggtggaagtgccaaattgatatttggtgagggtactaaattgactgttagctcaccagacatccagaacccagaacctgctgtgtaccagttaaaagatcctcggtctcaggacagcaccctctgcctgttcaccgactttgactcccaaatcaatgtgccgaaaaccatggaatctggaacgttcatcactgacaaaactgtgctggacatgaaagctatggattccaagagcaatggggccattgcctggagcaaccagacaagcttcacctgccaagatatcttcaaagagaccaacgccacctaccccagttcagacgttccctgtgatgccacgttgaccgagaaaagctttgaaacagatatgaacctaaactttcaaaacctgtcagttatgggactccgaatcctcctgctgaaagtagcgggatttaacctgctcatgacgctgaggctgtggtccagtcgggccaagcggtccggatccggagccaccaacttcagcctgctgaagcaggccggcgacgtggaggagaaccccggccccatgtctaatactgcatttccagatccggcctggaatactacactccttagttgggttgccctcttcctccttggcacgaagcacatggaagccgccgtcacccagagtccgagaaacaaagtagcggtcaccggcggtaaggtaacattgagttgtaaccaaacgaacaaccataacaatatgtactggtatagacaagacacaggccatggcttgcgcctgattcactacagctatggagcggggagtacggagaagggtgatattcccgatggctataaagcctctcggcctagccaggagaattttagtttgatcctggagctcgcaacccccagtcagactagcgtctacttttgtgcctcaggcgacaatagtgcggaaaccctttacttcggccctgggacaagacttttggttctagaggatctgagaaatgtgactccacccaaggtctccttgtttgagccatcaaaagcagagattgcaaacaaacaaaaggctaccctcgtgtgcttggccaggggcttcttccctgaccacgtggagctgagctggtgggtgaatggcaaggaggtccacagtggggtcagcacggaccctcaggcctacaaggagagcaattatagctactgcctgagcagccgcctgagggtctctgctaccttctggcacaatcctcgaaaccacttccgctgccaagtgcagttccatgggctttcagaggaggacaagtggccagagggctcacccaaacctgtcacacagaacatcagtgcagaggcctggggccgagcagactgtggaatcacttcagcatcctatcatcagggggttctgtctgcaaccatcctctatgagatcctactggggaaggccaccctatatgctgtgctggtcagtggcctggtgctgatggccatggtcaagaaaaaaaattcctag

SEQ ID NO: 263 - protein, 619 aa, Artificial Sequence
  H-Y TCR alpha and beta
MFPVTILLLSAFFSLRGNSAQSVDQPDAHVTLSEGASLELRCSYSYSAAPYLFWYVQYPGQSLQFLLKYITGDTVVKGTKGFEAEFRKSNSSFNLKKSPAHWSDSAKYFCALEGQDQGGSAKLIFGEGTKLTVSSPYIQNPDPAVYQLRDSKSSDKSVCLFTDFDSQTNVSQSKDSDVYITDKCVLDMRSMDFKSNSAVAWSNKSDFACANAFNNSIIPEDTFFPSPESSCDVKLVEKSFETDTNLNFQNLSVIGFRILLLKVAGFNLLMTLRLWSSGSGATNFSLLKQAGDVEENPGPMSNTAFPDPAWNTTLLSWVALFLLGTKHMEAAVTQSPRNKVAVTGGKVTLSCNQTNNHNNMYWYRQDTGHGLRLIHYSYGAGSTEKGDIPDGYKASRPSQENFSLILELATPSQTSVYFCASGDNSAETLYFGPGTRLLVLEDLKNVFPPEVAVFEPSEAEISHTQKATLVCLATGFYPDHVELSWWVNGKEVHSGVCTDPQPLKEQPALNDSRYCLSSRLRVSATFWQNPRNHFRCQVQFYGLSENDEWTQDRAKPVTQIVSAEAWGRADCGFTSESYQQGVLSATILYEILLGKATLYAVLVSALVLMAMVKRKDSRG

SEQ ID NO: 264 - DNA, 1860 bp, Artificial Sequence
  H-Y TCR alpha and beta
atgttccccgttaccatattgctcctgagtgctttcttcagtttgcgagggaactctgcccaatctgtcgatcagccagatgcacacgttaccctttccgagggtgcgtcacttgaactgaggtgttcctatagctactcagcagccccttatctgttttggtacgtacaatacccagggcagagtctccaatttctccttaaatatataaccggggacactgtagtgaaggggactaaaggttttgaagcagagtttaggaagagcaacagctccttcaaccttaagaagtcacccgcacactggtcagactccgcgaaatacttctgtgctctggaagggcaagaccagggtggaagtgccaaattgatatttggtgagggtactaaattgactgttagctcaccgtatatccagaaccctgaccctgccgtgtaccagctgagagactctaaatccagtgacaagtctgtctgcctattcaccgattttgattctcaaacaaatgtgtcacaaagtaaggattctgatgtgtatatcacagacaaatgtgtgctagacatgaggtctatggacttcaagagcaacagtgctgtggcctggagcaacaaatctgactttgcatgtgcaaacgccttcaacaacagcattattccagaagacaccttcttccccagcccagaaagttcctgtgatgtcaagctggtcgagaaaagctttgaaacagatacgaacctaaactttcaaaacctgtcagtgattgggttccgaatcctcctcctgaaagtggccgggtttaatctgctcatgacgctgcggctgtggtccagcggatccggagccaccaacttcagcctgctgaagcaggccggcgacgtggaggagaaccccggccccatgtctaatactgcatttccagatccggcctggaatactacactccttagttgggttgccctcttcctccttggcacgaagcacatggaagccgccgtcacccagagtccgagaaacaaagtagcggtcaccggcggtaaggtaacattgagttgtaaccaaacgaacaaccataacaatatgtactggtatagacaagacacaggccatggcttgcgcctgattcactacagctatggagcggggagtacggagaagggtgatattcccgatggctataaagcctctcggcctagccaggagaattttagtttgatcctggagctcgcaacccccagtcagactagcgtctacttttgtgcctcaggcgacaatagtgcggaaaccctttacttcggccctgggacaagacttttggttctggaggacctgaaaaacgtgttcccacccgaggtcgctgtgtttgagccatcagaagcagagatctcccacacccaaaaggccacactggtgtgcctggccacaggcttctaccccgaccacgtggagctgagctggtgggtgaatgggaaggaggtgcacagtggggtctgcacagacccgcagcccctcaaggagcagcccgccctcaatgactccagatactgcctgagcagccgcctgagggtgtcggccaccttctggcagaacccccgcaaccacttccgctgtcaagtccagttctacgggctctcggagaatgacgagtggacccaggatagggccaaacctgtcacccagatcgtcagcgccgaggcctggggtagagcagactgtggcttcacctccgagtcttaccagcaaggggtcctgtctgccaccatcctctatgagatcttgctagggaaggccaccttgtatgccgtgctggtcagtgccctcgtgctgatggccatggtcaagagaaaggattccagaggctag

SEQ ID NO: 265 - protein, 9 aa, Artificial Sequence
  NY-ESO-1
SLLMWITQV

SEQ ID NO: 266 - protein, 9 aa, Artificial Sequence
  HA-1(R) peptide
VLRDDLLEA

SEQ ID NO: 267 - protein, 607 aa, Artificial Sequence
  NY-ESO-1 TCR alpha and beta
METLLGLLILWLQLQWVSSKQEVTQIPAALSVPEGENLVLNCSFTDSAIYNLQWFRQDPGKGLTSLLLIQSSQREQTSGRLNASLDKSSGRSTLYIAASQPGDSATYLCAVRPLYGGSYIPTFGRGTSLIVHPYIQNPDPAVYQLRDSKSSDKSVCLFTDFDSQTNVSQSKDSDVYITDKCVLDMRSMDFKSNSAVAWSNKSDFACANAFNNSIIPEDTFFPSPESSCDVKLVEKSFETDTNLNFQNLSVIGFRILLLKVAGFNLLMTLRLWSSGSGATNFSLLKQAGDVEENPGPMSIGLLCCAALSLLWAGPVNAGVTQTPKFQVLKTGQSMTLQCAQDMNHEYMSWYRQDPGMGLRLIHYSVGAGITDQGEVPNGYNVSRSTTEDFPLRLLSAAPSQTSVYFCASSYVGNTGELFFGEGSRLTVLEDLKNVFPPEVAVFEPSEAEISHTQKATLVCLATGFYPDHVELSWWVNGKEVHSGVCTDPQPLKEQPALNDSRYCLSSRLRVSATFWQNPRNHFRCQVQFYGLSENDEWTQDRAKPVTQIVSAEAWGRADCGFTSESYQQGVLSATILYEILLGKATLYAVLVSALVLMAMVKRKDSRG

SEQ ID NO: 268 - DNA, 1824 bp, Artificial Sequence
  NY-ESO-1 TCR alpha and beta
atggagacactcttgggcctgcttatcctttggctgcagctgcaatgggtgagcagcaaacaggaggtgacgcagattcctgcagctctgagtgtcccagaaggagaaaacttggttctgaactgcagtttcactgatagcgctatttacaacctccagtggtttaggcaggaccctgggaaaggactcacatctctgttgcttattcagtcaagtcagagagagcaaacaagtggaagacttaatgcctcgctggataaatcatcaggacgtagtactttatacattgcagcttctcagcctggtgactcagccacctacctctgtgctgtgaggcccctctacggaggaagctacatacctacatttggaagaggaaccagccttattgttcatccgtatatccagaaccctgaccctgccgtgtaccagctgagagactctaaatccagtgacaagtctgtctgcctattcaccgattttgattctcaaacaaatgtgtcacaaagtaaggattctgatgtgtatatcacagacaaatgtgtgctagacatgaggtctatggacttcaagagcaacagtgctgtggcctggagcaacaaatctgactttgcatgtgcaaacgccttcaacaacagcattattccagaagacaccttcttccccagcccagaaagttcctgtgatgtcaagctggtcgagaaaagctttgaaacagatacgaacctaaactttcaaaacctgtcagtgattgggttccgaatcctcctcctgaaagtggccgggtttaatctgctcatgacgctgcggctgtggtccagcggatccggagccaccaacttcagcctgctgaagcaggccggcgacgtggaggagaaccccggccccatgagcatcggcctcctgtgctgtgcagccttgtctctcctgtgggcaggtccagtgaatgctggtgtcactcagaccccaaaattccaggtcctgaagacaggacagagcatgacactgcagtgtgcccaggatatgaaccatgaatacatgtcctggtatcgacaagacccaggcatggggctgaggctgattcattactcagttggtgctggtatcactgaccaaggagaagtccccaatggctacaatgtctccagatcaaccacagaggatttcccgctcaggctgctgtcggctgctccctcccagacatctgtgtacttctgtgccagcagttacgtcgggaacaccggggagctgttttttggagaaggctctaggctgaccgtactggaggacctgaaaaacgtgttcccacccgaggtcgctgtgtttgagccatcagaagcagagatctcccacacccaaaaggccacactggtgtgcctggccacaggcttctaccccgaccacgtggagctgagctggtgggtgaatgggaaggaggtgcacagtggggtctgcacagacccgcagcccctcaaggagcagcccgccctcaatgactccagatactgcctgagcagccgcctgagggtgtcggccaccttctggcagaacccccgcaaccacttccgctgtcaagtccagttctacgggctctcggagaatgacgagtggacccaggatagggccaaacctgtcacccagatcgtcagcgccgaggcctggggtagagcagactgtggcttcacctccgagtcttaccagcaaggggtcctgtctgccaccatcctctatgagatcttgctagggaaggccaccttgtatgccgtgctggtcagtgccctcgtgctgatggccatggtcaagagaaaggattccagaggctag

SEQ ID NO: 269 - protein, 612 aa, Artificial Sequence
  KRAS TCR
MQRNLGAVLGILWVQICWVRGDQVEQSPSALSLHEGTDSALRCNFTTTMRSVQWFRQNSRGSLISLFYLASGTKENGRLKSAFDSKERRYSTLHIRDAQLEDSGTYFCAADSSNTGYQNFYFGKGTSLTVIPNIQNPEPAVYQLKDPRSQDSTLCLFTDFDSQINVPKTMESGTFITDKTVLDMKAMDSKSNGAIAWSNQTSFTCQDIFKETNATYPSSDVPCDATLTEKSFETDMNLNFQNLSVMGLRILLLKVAGFNLLMTLRLWSSRAKRSGSGATNFSLLKQAGDVEENPGPMSNTAFPDPAWNTTLLSWVALFLLGTSSANSGVVQSPRYIIKGKGERSILKCIPISGHLSVAWYQQTQGQELKFFIQHYDKMERDKGNLPSRFSVQQFDDYHSEMNMSALELEDSAVYFCASSLTDPLDSDYTFGSGTRLLVIEDLRNVTPPKVSLFEPSKAEIANKQKATLVCLARGFFPDHVELSWWVNGKEVHSGVSTDPQAYKESNYSYCLSSRLRVSATFWHNPRNHFRCQVQFHGLSEEDKWPEGSPKPVTQNISAEAWGRADCGITSASYQQGVLSATILYEILLGKATLYAVLVSTLVVMAMVKRKNS

SEQ ID NO: 270 - DNA, 1839 bp, Artificial Sequence
  KRAS TCR
atgcagaggaacctgggagctgtgctggggattctgtgggtgcagatttgctgggtgagaggggatcaggtggagcagagtccttcagccctgagcctccacgagggaaccgattctgctctgagatgcaattttacgaccaccatgaggagtgtgcagtggttccgacagaattccaggggcagcctcatcagtttgttctacttggcttcaggaacaaaggagaatgggaggctaaagtcagcatttgattctaaggagcggcgctacagcaccctgcacatcagggatgcccagctggaggactcaggcacttacttctgtgctgctgactcttcgaacacgggttaccagaacttctattttgggaaaggaacaagtttgactgtcattccaaacatccagaacccagaacctgctgtgtaccagttaaaagatcctcggtctcaggacagcaccctctgcctgttcaccgactttgactcccaaatcaatgtgccgaaaaccatggaatctggaacgttcatcactgacaaaactgtgctggacatgaaagctatggattccaagagcaatggggccattgcctggagcaaccagacaagcttcacctgccaagatatcttcaaagagaccaacgccacctaccccagttcagacgttccctgtgatgccacgttgaccgagaaaagctttgaaacagatatgaacctgaactttcaaaacctgtcagttatgggactccgaatcctcctgctgaaagtagcgggatttaacctgctcatgacgctgaggctgtggtccagtcgggccaagcggtccggatccggagccaccaacttcagcctgctgaagcaggccggcgacgtggaggagaaccccggccccatgtctaacactgccttccctgaccccgcctggaacaccaccctgctatcttgggttgctctctttctcctgggaacaagttcagcaaattctggggttgtccagtctccaagatacataatcaaaggaaagggagaaaggtccattctaaaatgtattcccatctctggacatctctctgtggcctggtatcaacagactcaggggcaggaactaaagttcttcattcagcattatgataaaatggagagagataaaggaaacctgcccagcagattctcagtccaacagtttgatgactatcactctgagatgaacatgagtgccttggagctagaggactctgccgtgtacttctgtgccagctctctcacagatccgctagactccgactacaccttcggctcagggaccaggcttttggtaatagaggatctgagaaatgtgactccacccaaggtctccttgtttgagccatcaaaagcagagattgcaaacaaacaaaaggctaccctcgtgtgcttggccaggggcttcttccctgaccacgtggagctgagctggtgggtgaatggcaaggaggtccacagtggggtcagcacggaccctcaggcctacaaggagagcaattatagctactgcctgagcagccgcctgagggtctctgctaccttctggcacaatcctcgcaaccacttccgctgccaagtgcagttccatgggctttcagaggaggacaagtggccagagggctcacccaaacctgtcacacagaacatcagtgcagaggcctggggccgagcagactgtgggattacctcagcatcctatcaacaaggggtcttgtctgccaccatcctctatgagatcctgctagggaaagccaccctgtatgctgtgcttgtcagtacactggtggtgatggctatggtcaaaagaaagaattcatag

SEQ ID NO: 271 - protein, 18 aa, Artificial Sequence
  T2A self cleaving peptide
EGRGSLLTCGDVEENPGP

SEQ ID NO: 272 - protein, 20 aa, Artificial Sequence
  E2A self cleaving peptide
QCTNYALLKLAGDVESNPGP

SEQ ID NO: 273 - protein, 22 aa, Artificial Sequence
  F2A self cleaving peptide
VKQTLNFDLLKLAGDVESNPGP

SEQ ID NO: 274 - protein, 6 aa, Artificial Sequence
  ITIM
  Z (1)..(1): Z is S, I V or L
  X (2)..(2): X is any amino acid
  X (4)..(5): X is any amino acid
  Z (6)..(6): Z is I, V or L
ZXYXXZ

SEQ ID NO: 275 - protein, 242 aa, Artificial Sequence
  CD19 ScFv
DIQMTQTTSSLSASLGDRVTISCRASQDISKYLNWYQQKPDGTVKLLIYHTSRLHSGVPSRFSGSGSGTDYSLTISNLEQEDIATYFCQQGNTLPYTFGGGTKLEITGGGGSGGGGSGGGGSEVKLQESGPGLVAPSQSLSVTCTVSGVSLPDYGVSWIRQPPRKGLEWLGVIWGSETTYYNSALKSRLTIIKDNSKSQVFLKMNSLQTDDTAIYYCAKHYYYGGSYAMDYWGQGTSVTVSS

SEQ ID NO: 276 - DNA, 726 bp, Artificial Sequence
  CD19 ScFv
gacatccagatgacacagactacatcctccctgtctgcctctctgggagacagagtcaccatcagttgcagggcaagtcaggacattagtaaatatttaaattggtatcagcagaaaccagatggaactgttaaactcctgatctaccatacatcaagattacactcaggagtcccatcaaggttcagtggcagtgggtctggaacagattattctctcaccattagcaacctggagcaagaagatattgccacttacttttgccaacagggtaatacgcttccgtacacgttcggaggggggaccaagctggagatcacaggtggcggtggctcgggcggtggtgggtcgggtggcggcggatctgaggtgaaactgcaggagtcaggacctggcctggtggcgccctcacagagcctgtccgtcacatgcactgtctcaggggtctcattacccgactatggtgtaagctggattcgccagcctccacgaaagggtctggagtggctgggagtaatatggggtagtgaaaccacatactataattcagctctcaaatccagactgaccatcatcaaggacaactccaagagccaagttttcttaaaaatgaacagtctgcaaactgatgacacagccatttactactgtgccaaacattattactacggtggtagctatgctatggactactggggccaaggaacctcagtcaccgtgtcctca

SEQ ID NO: 277 - protein, 244 aa, Artificial Sequence
  CD19 ScFv
DIQMTQTTSSLSASLGDRVTISCRASQDISKYLNWYQQKPDGTVKLLIYHTSRLHSGVPSRFSGSGSGTDYSLTISNLEQEDIATYFCQQGNTLPYTFGGGTKLEITGGGGSGGGGSGGGGSGGEVKLQESGPGLVAPSQSLSVTCTVSGVSLPDYGVSWIRQPPRKGLEWLGVIWGSETTYYNSALKSRLTIIKDNSKSQVFLKMNSLQTDDTAIYYCAKHYYYGGSYAMDYWGQGTSVTVSS

SEQ ID NO: 278 - DNA, 732 bp, Artificial Sequence
  CD19 ScFv
gacatccagatgacacagactacatcctccctgtctgcctctctgggagacagagtcaccatcagttgcagggcaagtcaggacattagtaaatatttaaattggtatcagcagaaaccagatggaactgttaaactcctgatctaccatacatcaagattacactcaggagtcccatcaaggttcagtggcagtgggtctggaacagattattctctcaccattagcaacctggagcaagaagatattgccacttacttttgccaacagggtaatacgcttccgtacacgttcggaggggggaccaagctggagatcacaggcggaggtggaagcggagggggaggatctggcggcggaggaagcggaggcgaggtgaaactgcaggagtcaggacctggcctggtggcgccctcacagagcctgtccgtcacatgcactgtctcaggggtctcattacccgactatggtgtaagctggattcgccagcctccacgaaagggtctggagtggctgggagtaatatggggtagtgaaaccacatactataattcagctctcaaatccagactgaccatcatcaaggacaactccaagagccaagttttcttaaaaatgaacagtctgcaaactgatgacacagccatttactactgtgccaaacattattactacggtggtagctatgctatggactactggggccaaggaacctcagtcaccgtgtcctca

SEQ ID NO: 279 - protein, 509 aa, Artificial Sequence
  CD19 CAR
DIQMTQTTSSLSASLGDRVTISCRASQDISKYLNWYQQKPDGTVKLLIYHTSRLHSGVPSRFSGSGSGTDYSLTISNLEQEDIATYFCQQGNTLPYTFGGGTKLEITGGGGSGGGGSGGGGSEVKLQESGPGLVAPSQSLSVTCTVSGVSLPDYGVSWIRQPPRKGLEWLGVIWGSETTYYNSALKSRLTIIKDNSKSQVFLKMNSLQTDDTAIYYCAKHYYYGGSYAMDYWGQGTSVTVSSTTTPAPRPPTPAPTIASQPLSLRPEACRPAAGGAVHTRGLDFACDFWVLVVVGGVLACYSLLVTVAFIIFWVRSKRSRLLHSDYMNMTPRRPGPTRKHYQPYAPPRDFAAYRSKRGRKKLLYIFKQPFMRPVQTTQEEDGCSCRFPEEEEGGCELRVKFSRSADAPAYKQGQNQLYNELNLGRREEYDVLDKRRGRDPEMGGKPRRKNPQEGLYNELQKDKMAEAYSEIGMKGERRRGKGHDGLYQGLSTATKDTYDALHMQALPPR

SEQ ID NO: 280 - DNA, 1527 bp, Artificial Sequence
  CD19 CAR
gacatccagatgacacagactacatcctccctgtctgcctctctgggagacagagtcaccatcagttgcagggcaagtcaggacattagtaaatatttaaattggtatcagcagaaaccagatggaactgttaaactcctgatctaccatacatcaagattacactcaggagtcccatcaaggttcagtggcagtgggtctggaacagattattctctcaccattagcaacctggagcaagaagatattgccacttacttttgccaacagggtaatacgcttccgtacacgttcggaggggggaccaagctggagatcacaggtggcggtggctcgggcggtggtgggtcgggtggcggcggatctgaggtgaaactgcaggagtcaggacctggcctggtggcgccctcacagagcctgtccgtcacatgcactgtctcaggggtctcattacccgactatggtgtaagctggattcgccagcctccacgaaagggtctggagtggctgggagtaatatggggtagtgaaaccacatactataattcagctctcaaatccagactgaccatcatcaaggacaactccaagagccaagttttcttaaaaatgaacagtctgcaaactgatgacacagccatttactactgtgccaaacattattactacggtggtagctatgctatggactactggggccaaggaacctcagtcaccgtgtcctcaaccacgacgccagcgccgcgaccaccaacaccggcgcccaccatcgcgtcgcagcccctgtccctgcgcccagaggcgtgccggccagcggcggggggcgcagtgcacacgagggggctggacttcgcctgtgatttctgggtgctggtcgttgtgggcggcgtgctggcctgctacagcctgctggtgacagtggccttcatcatcttttgggtgaggagcaagcggagcagactgctgcacagcgactacatgaacatgaccccccggaggcctggccccacccggaagcactaccagccctacgcccctcccagggatttcgccgcctaccggagcaaacggggcagaaagaaactcctgtatatattcaaacaaccatttatgaggccagtacaaactactcaagaggaagatggctgtagctgccgatttccagaagaagaagaaggaggatgtgaactgagagtgaagttcagcaggagcgcagacgcccccgcgtacaagcagggccagaaccagctctataacgagctcaatctaggacgaagagaggagtacgatgttttggacaagcgtagaggccgggaccctgagatggggggaaagccgagaaggaagaaccctcaggaaggcctgtacaatgaactgcagaaagataagatggcggaggcctacagtgagattgggatgaaaggcgagcgccggaggggcaaggggcacgatggcctttaccagggactcagtacagccaccaaggacacctacgacgcccttcacatgcaggccctgccccctcgc

SEQ ID NO: 281 - protein, 509 aa, Artificial Sequence; identical to SEQ ID NO: 279
  CD19 CAR

SEQ ID NO: 282 - protein, 246 aa, Artificial Sequence
  CEA ScFv
QVQLVQSGSELKKPGASVKVSCKASGYTFTEFGMNWVRQAPGQGLEWMGWINTKTGEATYVEEFKGRFVFSLDTSVSTAYLQISSLKAEDTAVYYCARWDFAYYVEAMDYWGQGTTVTVSSGGGGSGGGGSGGGGSGGDIQMTQSPSSLSASVGDRVTITCKASQNVGTNVAWYQQKPGKAPKLLIYSASYRYSGVPSRFSGSGSGTDFTLTISSLQPEDFATYYCHQYYTYPLFTFGQGTKLEIK

SEQ ID NO: 283 - DNA, 1542 bp, Artificial Sequence
  CEA ScFv
caggtgcagctggtgcaatctgggtctgagttgaagaagcctggggcctcagtgaaggtttcctgcaaggcttctggatacaccttcactgagtttggaatgaactgggtgcgacaggcccctggacaagggcttgagtggatgggatggataaacaccaaaactggagaggcaacatatgttgaagagtttaagggacggtttgtcttctccttggacacctctgtcagcacggcatatctgcagatcagcagcctaaaggctgaagacactgccgtgtattactgtgcgagatgggacttcgcttattacgtggaggctatggactactggggccaagggaccacggtcaccgtctcctcaggcggaggtggaagcggagggggaggatctggcggcggaggaagcggaggcgatatccagatgacccagtctccatcctccctgtctgcatctgtgggagacagagtcaccatcacttgcaaggccagtcagaatgtgggtactaatgttgcctggtatcagcagaaaccagggaaagcacctaagctcctgatctattcggcatcctaccgctacagtggagtcccatcaaggttcagtggcagtggatctgggacagatttcactctcaccatcagcagtctgcaacctgaagatttcgcaacttactactgtcaccaatattacacctatcctctattcacgtttggccagggcaccaagctcgagatcaagatggacatgagggtccccgctcagctcctggggctcctgctactctggctccgaggtgccagatgtcaggtgcagctggtgcaatctgggtctgagttgaagaagcctggggcctcagtgaaggtttcctgcaaggcttctggatacaccttcactgagtttggaatgaactgggtgcgacaggcccctggacaagggcttgagtggatgggatggataaacaccaaaactggagaggcaacatatgttgaagagtttaagggacggtttgtcttctccttggacacctctgtcagcacggcatatctgcagatcagcagcctaaaggctgaagacactgccgtgtattactgtgcgagatgggacttcgcttattacgtggaggctatggactactggggccaagggaccacggtcaccgtctcctcaggcggaggtggaagcggagggggaggatctggcggcggaggaagcggaggcgatatccagatgacccagtctccatcctccctgtctgcatctgtgggagacagagtcaccatcacttgcaaggccagtcagaatgtgggtactaatgttgcctggtatcagcagaaaccagggaaagcacctaagctcctgatctattcggcatcctaccgctacagtggagtcccatcaaggttcagtggcagtggatctgggacagatttcactctcaccatcagcagtctgcaacctgaagatttcgcaacttactactgtcaccaatattacacctatcctctattcacgtttggccagggcaccaagctcgagatcaag

SEQ ID NO: 284 - protein, 246 aa, Artificial Sequence
  CEA ScFv
QVQLVQSGAEVKKPGASVKVSCKASGYTFTEFGMNWVRQAPGQGLEWMGWINTKTGEATYVEEFKGRVTFTTDTSTSTAYMELRSLRSDDTAVYYCARWDFAYYVEAMDYWGQGTTVTVSSGGGGSGGGGSGGGGSGGDIQMTQSPSSLSASVGDRVTITCKASAAVGTYVAWYQQKPGKAPKLLIYSASYRKRGVPSRFSGSGSGTDFTLTISSLQPEDFATYYCHQYYTYPLFTFGQGTKLEIK

SEQ ID NO: 285 - DNA, 738 bp, Artificial Sequence
  CEA ScFv
caggtgcagctggtgcagtctggcgccgaagtgaagaaacctggagctagtgtgaaggtgtcctgcaaggccagcggctacaccttcaccgagttcggcatgaactgggtccgacaggctccaggccagggcctcgaatggatgggctggatcaacaccaagaccggcgaggccacctacgtggaagagttcaagggcagagtgaccttcaccacggacaccagcaccagcaccgcctacatggaactgcggagcctgagaagcgacgacaccgccgtgtactactgcgccagatgggacttcgcttattacgtggaagccatggactactggggccagggcaccaccgtgaccgtgtctagcggcggaggtggaagcggagggggaggatctggcggcggaggaagcggaggcgatatccagatgacccagtctccatcctccctgtctgcatctgtgggagacagagtcaccatcacttgcaaggccagtgcggctgtgggtacgtatgttgcgtggtatcagcagaaaccagggaaagcacctaagctcctgatctattcggcatcctaccgcaaaaggggagtcccatcaaggttcagtggcagtggatctgggacagatttcactctcaccatcagcagtctgcaacctgaagatttcgcaacttactactgtcaccaatattacacctatcctctattcacgtttggccagggcaccaagctcgagatcaag

SEQ ID NO: 286 - protein, 246 aa, Artificial Sequence
  CEA ScFv
QVQLVQSGSELKKPGASVKVSCKASGYTFTEFGMNWVRQAPGQGLEWMGWINTKTGEATYVEEFKGRFVFSLDTSVSTAYLQISSLKAEDTAVYYCARWDFAHYFQTMDYWGQGTTVTVSSGGGGSGGGGSGGGGSGGDIQMTQSPSSLSASVGDRVTITCKASAAVGTYVAWYQQKPGKAPKLLIYSASYRKRGVPSRFSGSGSGTDFTLTISSLQPEDFATYYCHQYYTYPLFTFGQGTKLEIK

SEQ ID NO: 287 - DNA, 738 bp, Artificial Sequence
  CEA ScFv
caggtgcagctggtgcaatctgggtctgagttgaagaagcctggggcctcagtgaaggtttcctgcaaggcttctggatacaccttcactgagtttggaatgaactgggtgcgacaggcccctggacaagggcttgagtggatgggatggataaacaccaaaactggagaggcaacatatgttgaagagtttaagggacggtttgtcttctccttggacacctctgtcagcacggcatatctgcagatcagcagcctaaaggctgaagacactgccgtgtattactgtgcgagatgggactttgctcattactttcagactatggactactggggccaagggaccacggtcaccgtctcctcaggcggaggtggaagcggagggggaggatctggcggcggaggaagcggaggcgatatccagatgacccagtctccatcctccctgtctgcatctgtgggagacagagtcaccatcacttgcaaggccagtgcggctgtgggtacgtatgttgcgtggtatcagcagaaaccagggaaagcacctaagctcctgatctattcggcatcctaccgcaaaaggggagtcccatcaaggttcagtggcagtggatctgggacagatttcactctcaccatcagcagtctgcaacctgaagatttcgcaacttactactgtcaccaatattacacctatcctctattcacgtttggccagggcaccaagctcgagatcaag

SEQ ID NO: 288 - protein, 535 aa, Artificial Sequence
  CEA CAR
MDMRVPAQLLGLLLLWLRGARCQVQLVQSGSELKKPGASVKVSCKASGYTFTEFGMNWVRQAPGQGLEWMGWINTKTGEATYVEEFKGRFVFSLDTSVSTAYLQISSLKAEDTAVYYCARWDFAYYVEAMDYWGQGTTVTVSSGGGGSGGGGSGGGGSGGDIQMTQSPSSLSASVGDRVTITCKASQNVGTNVAWYQQKPGKAPKLLIYSASYRYSGVPSRFSGSGSGTDFTLTISSLQPEDFATYYCHQYYTYPLFTFGQGTKLEIKTTTPAPRPPTPAPTIASQPLSLRPEACRPAAGGAVHTRGLDFACDFWVLVVVGGVLACYSLLVTVAFIIFWVRSKRSRLLHSDYMNMTPRRPGPTRKHYQPYAPPRDFAAYRSKRGRKKLLYIFKQPFMRPVQTTQEEDGCSCRFPEEEEGGCELRVKFSRSADAPAYKQGQNQLYNELNLGRREEYDVLDKRRGRDPEMGGKPRRKNPQEGLYNELQKDKMAEAYSEIGMKGERRRGKGHDGLYQGLSTATKDTYDALHMQALPPR

SEQ ID NO: 289 - DNA, 1608 bp, Artificial Sequence
  CEA CAR
atggacatgagggtccccgctcagctcctggggctcctgctactctggctccgaggtgccagatgtcaggtgcagctggtgcaatctgggtctgagttgaagaagcctggggcctcagtgaaggtttcctgcaaggcttctggatacaccttcactgagtttggaatgaactgggtgcgacaggcccctggacaagggcttgagtggatgggatggataaacaccaaaactggagaggcaacatatgttgaagagtttaagggacggtttgtcttctccttggacacctctgtcagcacggcatatctgcagatcagcagcctaaaggctgaagacactgccgtgtattactgtgcgagatgggacttcgcttattacgtggaggctatggactactggggccaagggaccacggtcaccgtctcctcaggcggaggtggaagcggagggggaggatctggcggcggaggaagcggaggcgatatccagatgacccagtctccatcctccctgtctgcatctgtgggagacagagtcaccatcacttgcaaggccagtcagaatgtgggtactaatgttgcctggtatcagcagaaaccagggaaagcacctaagctcctgatctattcggcatcctaccgctacagtggagtcccatcaaggttcagtggcagtggatctgggacagatttcactctcaccatcagcagtctgcaacctgaagatttcgcaacttactactgtcaccaatattacacctatcctctattcacgtttggccagggcaccaagctcgagatcaagacaacgacgccagctccccgcccgccaacccctgcacctacgattgcatcacaaccgctgtccctgcggcctgaagcttgtcgcccagccgcaggtggcgccgtacatacacgggggctggattttgcctgtgatttctgggtgctggtcgttgtgggcggcgtgctggcctgctacagcctgctggtgacagtggccttcatcatcttttgggtgaggagcaagcggagtcgactgctgcacagcgactacatgaacatgaccccccggaggcctggccccacccggaagcactaccagccctacgcccctcccagggatttcgccgcctaccggagcaaacggggcagaaagaaactcctgtatatattcaaacaaccatttatgaggccagtacaaactactcaagaggaagatggctgtagctgccgatttccagaagaagaagaaggaggatgtgaactgagagtgaagttcagcaggagcgcagacgcccccgcgtacaagcagggccagaaccagctctataacgagctcaatctaggacgaagagaggagtacgatgttttggacaagcgtagaggccgggaccctgagatggggggaaagccgagaaggaagaaccctcaggaaggcctgtacaatgaactgcagaaagataagatggcggaggcctacagtgagattgggatgaaaggcgagcgccggaggggcaaggggcacgatggcctttaccagggactcagtacagccaccaaggacacctacgacgcccttcacatgcaggccctgccccctcgctag

SEQ ID NO: 290 - protein, 537 aa, Artificial Sequence
  CEA CAR
MDMRVPAQLLGLLLLWLRGARCQVQLVQSGAEVKKPGASVKVSCKASGYTFTEFGMNWVRQAPGQGLEWMGWINTKTGEATYVEEFKGRVTFTTDTSTSTAYMELRSLRSDDTAVYYCARWDFAYYVEAMDYWGQGTTVTVSSGGGGSGGGGSGGGGSGGDIQMTQSPSSLSASVGDRVTITCKASAAVGTYVAWYQQKPGKAPKLLIYSASYRKRGVPSRFSGSGSGTDFTLTISSLQPEDFATYYCHQYYTYPLFTFGQGTKLEIKRTTTTPAPRPPTPAPTIASQPLSLRPEACRPAAGGAVHTRGLDFACDFWVLVVVGGVLACYSLLVTVAFIIFWVRSKRSRLLHSDYMNMTPRRPGPTRKHYQPYAPPRDFAAYRSKRGRKKLLYIFKQPFMRPVQTTQEEDGCSCRFPEEEEGGCELRVKFSRSADAPAYKQGQNQLYNELNLGRREEYDVLDKRRGRDPEMGGKPRRKNPQEGLYNELQKDKMAEAYSEIGMKGERRRGKGHDGLYQGLSTATKDTYDALHMQALPPR

SEQ ID NO: 291 - DNA, 1614 bp, Artificial Sequence
  CEA CAR
atggacatgagggtccccgctcagctcctggggctcctgctactctggctccgaggtgccagatgtcaggtgcagctggtgcagtctggcgccgaagtgaagaaacctggagctagtgtgaaggtgtcctgcaaggccagcggctacaccttcaccgagttcggcatgaactgggtccgacaggctccaggccagggcctcgaatggatgggctggatcaacaccaagaccggcgaggccacctacgtggaagagttcaagggcagagtgaccttcaccacggacaccagcaccagcaccgcctacatggaactgcggagcctgagaagcgacgacaccgccgtgtactactgcgccagatgggacttcgcttattacgtggaagccatggactactggggccagggcaccaccgtgaccgtgtctagcggcggaggtggaagcggagggggaggatctggcggcggaggaagcggaggcgatatccagatgacccagtctccatcctccctgtctgcatctgtgggagacagagtcaccatcacttgcaaggccagtgcggctgtgggtacgtatgttgcgtggtatcagcagaaaccagggaaagcacctaagctcctgatctattcggcatcctaccgcaaaaggggagtcccatcaaggttcagtggcagtggatctgggacagatttcactctcaccatcagcagtctgcaacctgaagatttcgcaacttactactgtcaccaatattacacctatcctctattcacgtttggccagggcaccaagctcgagatcaagcgtacgacaacgacgccagctccccgcccgccaacccctgcacctacgattgcatcacaaccgctgtccctgcggcctgaagcttgtcgcccagccgcaggtggcgccgtacatacacgggggctggattttgcctgtgatttctgggtgctggtcgttgtgggcggcgtgctggcctgctacagcctgctggtgacagtggccttcatcatcttttgggtgaggagcaagcggagtcgactgctgcacagcgactacatgaacatgaccccccggaggcctggccccacccggaagcactaccagccctacgcccctcccagggatttcgccgcctaccggagcaaacggggcagaaagaaactcctgtatatattcaaacaaccatttatgaggccagtacaaactactcaagaggaagatggctgtagctgccgatttccagaagaagaagaaggaggatgtgaactgagagtgaagttcagcaggagcgcagacgcccccgcgtacaagcagggccagaaccagctctataacgagctcaatctaggacgaagagaggagtacgatgttttggacaagcgtagaggccgggaccctgagatggggggaaagccgagaaggaagaaccctcaggaaggcctgtacaatgaactgcagaaagataagatggcggaggcctacagtgagattgggatgaaaggcgagcgccggaggggcaaggggcacgatggcctttaccagggactcagtacagccaccaaggacacctacgacgcccttcacatgcaggccctgccccctcgctag

SEQ ID NO: 292 - protein, 536 aa, Artificial Sequence
  CEA CAR
MDMRVPAQLLGLLLLWLRGARCQVQLVQSGSELKKPGASVKVSCKASGYTFTEFGMNWVRQAPGQGLEWMGWINTKTGEATYVEEFKGRFVFSLDTSVSTAYLQISSLKAEDTAVYYCARWDFAHYFQTMDYWGQGTTVTVSSGGGGSGGGGSGGGGSGGDIQMTQSPSSLSASVGDRVTITCKASAAVGTYVAWYQQKPGKAPKLLIYSASYRKRGVPSRFSGSGSGTDFTLTISSLQPEDFATYYCHQYYTYPLFTFGQGTKLEIKRTTTPAPRPPTPAPTIASQPLSLRPEACRPAAGGAVHTRGLDFACDFWVLVVVGGVLACYSLLVTVAFIIFWVRSKRSRLLHSDYMNMTPRRPGPTRKHYQPYAPPRDFAAYRSKRGRKKLLYIFKQPFMRPVQTTQEEDGCSCRFPEEEEGGCELRVKFSRSADAPAYKQGQNQLYNELNLGRREEYDVLDKRRGRDPEMGGKPRRKNPQEGLYNELQKDKMAEAYSEIGMKGERRRGKGHDGLYQGLSTATKDTYDALHMQALPPR

SEQ ID NO: 293 - DNA, 1611 bp, Artificial Sequence
  CEA CAR
atggacatgagggtccccgctcagctcctggggctcctgctactctggctccgaggtgccagatgtcaggtgcagctggtgcaatctgggtctgagttgaagaagcctggggcctcagtgaaggtttcctgcaaggcttctggatacaccttcactgagtttggaatgaactgggtgcgacaggcccctggacaagggcttgagtggatgggatggataaacaccaaaactggagaggcaacatatgttgaagagtttaagggacggtttgtcttctccttggacacctctgtcagcacggcatatctgcagatcagcagcctaaaggctgaagacactgccgtgtattactgtgcgagatgggactttgctcattactttcagactatggactactggggccaagggaccacggtcaccgtctcctcaggcggaggtggaagcggagggggaggatctggcggcggaggaagcggaggcgatatccagatgacccagtctccatcctccctgtctgcatctgtgggagacagagtcaccatcacttgcaaggccagtgcggctgtgggtacgtatgttgcgtggtatcagcagaaaccagggaaagcacctaagctcctgatctattcggcatcctaccgcaaaaggggagtcccatcaaggttcagtggcagtggatctgggacagatttcactctcaccatcagcagtctgcaacctgaagatttcgcaacttactactgtcaccaatattacacctatcctctattcacgtttggccagggcaccaagctcgagatcaagcgtacaacgacgccagctccccgcccgccaacccctgcacctacgattgcatcacaaccgctgtccctgcggcctgaagcttgtcgcccagccgcaggtggcgccgtacatacacgggggctggattttgcctgtgatttctgggtgctggtcgttgtgggcggcgtgctggcctgctacagcctgctggtgacagtggccttcatcatcttttgggtgaggagcaagcggagtcgactgctgcacagcgactacatgaacatgaccccccggaggcctggccccacccggaagcactaccagccctacgcccctcccagggatttcgccgcctaccggagcaaacggggcagaaagaaactcctgtatatattcaaacaaccatttatgaggccagtacaaactactcaagaggaagatggctgtagctgccgatttccagaagaagaagaaggaggatgtgaactgagagtgaagttcagcaggagcgcagacgcccccgcgtacaagcagggccagaaccagctctataacgagctcaatctaggacgaagagaggagtacgatgttttggacaagcgtagaggccgggaccctgagatggggggaaagccgagaaggaagaaccctcaggaaggcctgtacaatgaactgcagaaagataagatggcggaggcctacagtgagattgggatgaaaggcgagcgccggaggggcaaggggcacgatggcctttaccagggactcagtacagccaccaaggacacctacgacgcccttcacatgcaggccctgccccctcgctag

SEQ ID NO: 294 - protein, 5 aa, Artificial Sequence
  CEA CDR-H1
EFGMN

SEQ ID NO: 295 - protein, 17 aa, Artificial Sequence
  CEA CDR-H2
WINTKTGEATYVEEFKG

SEQ ID NO: 296 - protein, 12 aa, Artificial Sequence
  CEA CDR-H3
WDFAYYVEAMDY

SEQ ID NO: 297 - protein, 12 aa, Artificial Sequence
  CEA CDR-H3
WDFAHYFQTMDY

SEQ ID NO: 298 - protein, 11 aa, Artificial Sequence
  CEA CDR-L1
KASQNVGTNVA

SEQ ID NO: 299 - protein, 11 aa, Artificial Sequence
  CEA CDR-L1
KASAAVGTYVA

SEQ ID NO: 300 - protein, 7 aa, Artificial Sequence
  CEA CDR-L2
SASYRYS

SEQ ID NO: 301 - protein, 7 aa, Artificial Sequence
  CEA CDR-L2
SASYRKR

SEQ ID NO: 302 - protein, 10 aa, Artificial Sequence
  CEA CDR-L3
HQYYTYPLFT

SEQ ID NO: 303 - protein, 10 aa, Artificial Sequence
  LB-CYBA-1Y peptide
  X (10)..(10): X is Y or H
STMERWGQKX

SEQ ID NO: 304 - protein, 11 aa, Artificial Sequence
  LB-OAS1-1R
  X (7)..(7): X is R or T
ETDDPRXYQKY

SEQ ID NO: 305 - protein, 9 aa, Artificial Sequence
  HA-2 peptide
  X (9)..(9): X is V or M
YIGEVLVSX

SEQ ID NO: 306 - protein, 9 aa, Artificial Sequence
  HA-8 peptide
  X (1)..(1): X is R or P
XTLDKVLEV

SEQ ID NO: 307 - protein, 9 aa, Artificial Sequence
  HA-3 peptide
  X (2)..(2): X is T or M
VXEPGTAQY

SEQ ID NO: 308 - protein, 11 aa, Artificial Sequence
  HwA11-S peptide
  X (6)..(6): X is S or T
CIPPDXLLFPA

SEQ ID NO: 309 - protein, 11 aa, Artificial Sequence
  LB-ADIR-1F peptide
  X (9)..(9): X is F or S
SVAPALALXPA

SEQ ID NO: 310 - protein, 9 aa, Artificial Sequence
  LB-HIVEP1-1S peptide
  X (6)..(6): X is S or N
SLPKHXVTI

SEQ ID NO: 311 - protein, 9 aa, Artificial Sequence
  LB-NISCH-1A peptide
  X (7)..(7): X is A or V
ALAPAPXEV

SEQ ID NO: 312 - protein, 9 aa, Artificial Sequence
  LB-SSR1-1S peptide
  X (1)..(1): X is S or L
XLAVAQDLT

SEQ ID NO: 313 - protein, 10 aa, Artificial Sequence
  LB-WNK1-1I peptide
  X (7)..(7): X is I or M
RTLSPEXITV

SEQ ID NO: 314 - protein, 10 aa, Artificial Sequence
  T4A peptide
  X (10)..(10): X is A or E
GLYTYWSAGX

SEQ ID NO: 315 - protein, 9 aa, Artificial Sequence
  UTA2-1 peptide
  X (3)..(3): X is L or P
QLXNSVLTL

SEQ ID NO: 316 - protein, 9 aa, Artificial Sequence
  LB-CLYBL-1Y peptide
  X (5)..(5): X is Y or D
SLAAXIPRL

SEQ ID NO: 317 - protein, 10 aa, Artificial Sequence
  TRIM22 peptide
  X (7)..(7): X is C or R
MAVPPCXIGV

SEQ ID NO: 318 - protein, 11 aa, Artificial Sequence
  PARP10-1L peptide
  X (3)..(3): X is L or P
GLXGQEGLVEI

SEQ ID NO: 319 - protein, 9 aa, Artificial Sequence
  FAM119A-1T peptide
  X (8)..(8): X is T or I
AMLERQFXV

SEQ ID NO: 320 - protein, 9 aa, Artificial Sequence
  GLRX3-1S peptide
  X (3)..(3): X is S or P
FLXSANEHL

SEQ ID NO: 321 - protein, 9 aa, Artificial Sequence
  HNF4G-1M peptide
  X (2)..(2): X is M or I
MXYKDILLL

SEQ ID NO: 322 - protein, 9 aa, Artificial Sequence
  HMMR-1V peptide
  X (6)..(6): X is V or A
SLQEKXAKA

SEQ ID NO: 323 - protein, 9 aa, Artificial Sequence
  BCL2A1 peptide
  X (4)..(4): X is N or K
VLQXVAFSV

SEQ ID NO: 324 - protein, 10 aa, Artificial Sequence
  CDC26-1F peptide
  X (1)..(1): X is F or S
XVAGTQEVFV

SEQ ID NO: 325 - protein, 10 aa, Artificial Sequence
  APOBEC3F-1S/A peptide
  X (3)..(3): X is S or A
FLXEHPNVTL

SEQ ID NO: 326 - protein, 9 aa, Artificial Sequence
  LB-PRCP-1D peptide
  X (8)..(8): X is D or E
FMWDVAEXL

SEQ ID NO: 327 - protein, 11 aa, Artificial Sequence
  LB-PRCP-1D peptide
  X (8)..(8): X is D or E
FMWDVAEXLKA

SEQ ID NO: 328 - protein, 9 aa, Artificial Sequence
  LB-CCL4-1T peptide
  X (7)..(7): X is T or S
CADPSEXWV

SEQ ID NO: 329 - protein, 9 aa, Artificial Sequence
  LB-NCAPD3-1Q peptide
  X (3)..(3): X is Q or R
WLXGVVPVV

SEQ ID NO: 330 - protein, 9 aa, Artificial Sequence
  LB-NDC80-1P peptide
  X (7)..(7): X is P or A
HLEEQIXKV

SEQ ID NO: 331 - protein, 9 aa, Artificial Sequence
  LB-TTK-1D peptide
  X (4)..(4): X is D or E
RLHXGRVFV

SEQ ID NO: 332 - protein, 9 aa, Artificial Sequence
  WDR27-1L peptide
  X (2)..(2): X is L or P
SXDDHVVAV

SEQ ID NO: 333 - protein, 11 aa, Artificial Sequence
  MIIP peptide
  X (8)..(8): X is K or E
SEESAVPXRSW

SEQ ID NO: 334 - protein, 10 aa, Artificial Sequence
  MIIP peptide
  X (7)..(7): X is K or E
EESAVPXRSW

SEQ ID NO: 335 - protein, 9 aa, Artificial Sequence
  LB-DHX33-1C peptide
  X (9)..(9): X is C or R
YLYEGGISX

SEQ ID NO: 336 - protein, 10 aa, Artificial Sequence
  PANE1 peptide
RVWDLPGVLK

SEQ ID NO: 337 - protein, 10 aa, Artificial Sequence
  SP110 peptide
  X (4)..(4): X is R or G
SLPXGTSTPK

SEQ ID NO: 338 - protein, 9 aa, Artificial Sequence
  ACC-1C/Y
  X (5)..(5): X is Y or C
DYLQXVLQI

SEQ ID NO: 339 - protein, 9 aa, Artificial Sequence
  P2RX7 peptide
  X (6)..(6): X is H or R
WFHHCXPKY

SEQ ID NO: 340 - protein, 9 aa, Artificial Sequence
  ACC-4 peptide
  X (9)..(9): X is R or G
ATLPLLCAX

SEQ ID NO: 341 - protein, 10 aa, Artificial Sequence
  ACC-5
  X (10)..(10): X is R or G
WATLPLLCAX

SEQ ID NO: 342 - protein, 9 aa, Artificial Sequence
  AKAP13 peptide
  X (9)..(9): X is M or T
APAGVREVX

SEQ ID NO: 343 - protein, 10 aa, Artificial Sequence
  LB-APOBEC3B-1K peptide
  X (1)..(1): X is K or E
XPQYHAEMCF

SEQ ID NO: 344 - protein, 9 aa, Artificial Sequence
  APOBEC3H peptide
  X (5)..(5): X is K or E
KPQQXGLRL

SEQ ID NO: 345 - protein, 8 aa, Artificial Sequence
  LB-ARHGDIB-1R peptide
  X (6)..(6): X is R or P
PRACWXEA

SEQ ID NO: 346 - protein, 10 aa, Artificial Sequence
  LB-BCAT2-1R peptide
  X (3)..(3): X is R or T
QPXRALLFVI

SEQ ID NO: 347 - protein, 11 aa, Artificial Sequence
  BFAR peptide
  X (11)..(11): X is M or R
APNTGRANQQX

SEQ ID NO: 348 - protein, 11 aa, Artificial Sequence
  C14orf169 peptide
  X (4)..(4): X is A or V
RPRXPTEELAL

SEQ ID NO: 349 - protein, 11 aa, Artificial Sequence
  LB-C16ORF-1R peptide
  X (1)..(1): X is R or W
XPCPSVGLSFL

SEQ ID NO: 350 - protein, 9 aa, Artificial Sequence
  C18orf21 peptide
  X (6)..(6): X is A or T
NPATPXSKL

SEQ ID NO: 351 - protein, 10 aa, Artificial Sequence
  LB-EBI3-1I peptide
  X (8)..(8): X is I or V
RPRARYYXQV

SEQ ID NO: 352 - protein, 9 aa, Artificial Sequence
  POP1 peptide
  X (7)..(7): X is N or K
LPQKKSXAL

SEQ ID NO: 353 - protein, 9 aa, Artificial Sequence
  SCRIB peptide
  X (7)..(7): X is L or P
LPQQPPXSL

SEQ ID NO: 354 - protein, 9 aa, Artificial Sequence
  MTRR peptide
  X (5)..(5): X is S or L
SPASXRTDL

SEQ ID NO: 355 - protein, 9 aa, Artificial Sequence
  LLGL2
  X (5)..(5): X is R or H
SPSLXILAI

SEQ ID NO: 356 - protein, 11 aa, Artificial Sequence
  LB-ECGF-1H peptide
  X (3)..(3): X is H or R
RPXAIRRPLAL

SEQ ID NO: 357 - protein, 11 aa, Artificial Sequence
  LB-ERAP1-1R peptide
  X (3)..(3): X is R or P
HPXQEQIALLA

SEQ ID NO: 358 - protein, 9 aa, Artificial Sequence
  LB-ERAP1-1R peptide
  X (3)..(3): X is R or P
HPXQEQIAL

SEQ ID NO: 359 - protein, 9 aa, Artificial Sequence
  LB-FUCA2-1V peptide
  X (5)..(5): X is V or M
RLRQXGSWL

SEQ ID NO: 360 - protein, 9 aa, Artificial Sequence
  LB-GEMIN4-1V peptide
  X (9)..(9): X is V or E
FPALRFVEX

SEQ ID NO: 361 - protein, 11 aa, Artificial Sequence
  HDGF peptide
  X (11)..(11): X is L or P
LPMEVEKNSTX

SEQ ID NO: 362 - protein, 11 aa, Artificial Sequence
  LB-PDCD11-1F peptide
  X (8)..(8): X is F or L
GPDSSKTXLCL

SEQ ID NO: 363 - protein, 9 aa, Artificial Sequence
  LB-PFAS-1P peptide
  X (2)..(2): X is P or S
AXGHTRRKL

SEQ ID NO: 364 - protein, 10 aa, Artificial Sequence
  LB-TEP1-1S peptide
  X (9)..(9): X is S or P
APDGAKVAXL

SEQ ID NO: 365 - protein, 11 aa, Artificial Sequence
  LB-TMEM8A-1I peptide
  X (7)..(7): X is I or V
RPRSVTXQPLL

SEQ ID NO: 366 - protein, 10 aa, Artificial Sequence
  LB-USP15-1I peptide
  X (8)..(8): X is I or T
MPSHLRNXLL

SEQ ID NO: 367 - protein, 9 aa, Artificial Sequence
  LRH-1 peptide
TPNQRQNVC

SEQ ID NO: 368 - protein, 9 aa, Artificial Sequence
  LB-MOB3A-1C peptide
  X (1)..(1): X is C or S
XPRPGTWTC

SEQ ID NO: 369 - protein, 11 aa, Artificial Sequence
  LB-ZDHHC6-1Y peptide
  X (4)..(4): X is Y or H
RPRXWILLVKI

SEQ ID NO: 370 - protein, 10 aa, Artificial Sequence
  ZAPHIR peptide
IPRDSWWVEL

SEQ ID NO: 371 - protein, 9 aa, Artificial Sequence
  HEATR1 peptide
  X (7)..(7): X is E or G
ISKERAXAL

SEQ ID NO: 372 - protein, 9 aa, Artificial Sequence
  LB-GSTP1-1V peptide
  X (7)..(7): X is V or I
DLRCKYXSL

SEQ ID NO: 373 - protein, 9 aa, Artificial Sequence
  HA-1/B60 peptide
  X (6)..(6): X is H or R
KECVLXDDL

SEQ ID NO: 374 - protein, 9 aa, Artificial Sequence
  LB-SON-1R peptide
  X (6)..(6): X is R or C
SETKQXTVL

SEQ ID NO: 375 - protein, 9 aa, Artificial Sequence
  LB-SWAP70-1Q peptide
  X (6)..(6): X is Q or E
MEQLEXLEL

SEQ ID NO: 376 - protein, 9 aa, Artificial Sequence
  LB-TRIP10-1EPC peptide
  X (2)..(2): X is E or G
  X (3)..(3): X is P or S
  X (7)..(7): X is C or G
GXXQDLXTL

SEQ ID NO: 377 - protein, 9 aa, Artificial Sequence
  LB-NUP133-1R peptide
  X (8)..(8): X is R or Q
SEDLILCXL

SEQ ID NO: 378 - protein, 11 aa, Artificial Sequence
  LB-ZNFX1-1Q peptide
  X (8)..(8): X is Q or H
NEIEDVWXLDL

SEQ ID NO: 379 - protein, 11 aa, Artificial Sequence
  SLC1A5 peptide
  X (3)..(3): X is A or P
AEXTANGGLAL

SEQ ID NO: 380 - protein, 10 aa, Artificial Sequence
  ACC-2 peptide
  X (6)..(6): X is D or G
KEFEDXIINW

SEQ ID NO: 381 - protein, 11 aa, Artificial Sequence
  ACC-6 peptide
MEIFIEVFSHF

SEQ ID NO: 382 - protein, 10 aa, Artificial Sequence
  HB-1H/Y peptide
  X (8)..(8): X is H or Y
EEKRGSLXVW

SEQ ID NO: 383 - protein, 9 aa, Artificial Sequence
  DPH1 peptide
  X (2)..(2): X is V or L
SXLPEVDVW

SEQ ID NO: 384 - protein, 9 aa, Artificial Sequence
  UGT2B17/A02 peptide
CVATMIFMI

SEQ ID NO: 385 - protein, 10 aa, Artificial Sequence
  UGT2B17/A29
AELLNIPFLY

SEQ ID NO: 386 - protein, 10 aa, Artificial Sequence
  UGT2B17/B44 peptide
AELLNIPFLY

SEQ ID NO: 387 - protein, 9 aa, Artificial Sequence
  DFFRY peptide
  X (4)..(4): X is C or S
IVDXLTEMY

SEQ ID NO: 388 - protein, 9 aa, Artificial Sequence
  SMCY peptide
FIDSYICQV

SEQ ID NO: 389 - protein, 11 aa, Artificial Sequence
  TMSB4Y peptide
EVLLRPGLHFR

SEQ ID NO: 390 - DNA, 1533 bp, Artificial Sequence
  CD19 CAR
gacatccagatgacacagactacatcctccctgtctgcctctctgggagacagagtcaccatcagttgcagggcaagtcaggacattagtaaatatttaaattggtatcagcagaaaccagatggaactgttaaactcctgatctaccatacatcaagattacactcaggagtcccatcaaggttcagtggcagtgggtctggaacagattattctctcaccattagcaacctggagcaagaagatattgccacttacttttgccaacagggtaatacgcttccgtacacgttcggaggggggaccaagctggagatcacaggcggaggtggaagcggagggggaggatctggcggcggaggaagcggaggcgaggtgaaactgcaggagtcaggacctggcctggtggcgccctcacagagcctgtccgtcacatgcactgtctcaggggtctcattacccgactatggtgtaagctggattcgccagcctccacgaaagggtctggagtggctgggagtaatatggggtagtgaaaccacatactataattcagctctcaaatccagactgaccatcatcaaggacaactccaagagccaagttttcttaaaaatgaacagtctgcaaactgatgacacagccatttactactgtgccaaacattattactacggtggtagctatgctatggactactggggccaaggaacctcagtcaccgtgtcctcaaccacgacgccagcgccgcgaccaccaacaccggcgcccaccatcgcgtcgcagcccctgtccctgcgcccagaggcgtgccggccagcggcggggggcgcagtgcacacgagggggctggacttcgcctgtgatttctgggtgctggtcgttgtgggcggcgtgctggcctgctacagcctgctggtgacagtggccttcatcatcttttgggtgaggagcaagcggagcagactgctgcacagcgactacatgaacatgaccccccggaggcctggccccacccggaagcactaccagccctacgcccctcccagggatttcgccgcctaccggagcaaacggggcagaaagaaactcctgtatatattcaaacaaccatttatgaggccagtacaaactactcaagaggaagatggctgtagctgccgatttccagaagaagaagaaggaggatgtgaactgagagtgaagttcagcaggagcgcagacgcccccgcgtacaagcagggccagaaccagctctataacgagctcaatctaggacgaagagaggagtacgatgttttggacaagcgtagaggccgggaccctgagatggggggaaagccgagaaggaagaaccctcaggaaggcctgtacaatgaactgcagaaagataagatggcggaggcctacagtgagattgggatgaaaggcgagcgccggaggggcaaggggcacgatggcctttaccagggactcagtacagccaccaaggacacctacgacgcccttcacatgcaggccctgccccctcgc

SEQ ID NO: 391 - protein, 245 aa, Artificial Sequence
  EGFR ScFv
QVQLQESGPGLVKPSQTLSLTCTVSGGSISSGDYYWSWIRQPPGKGLEWIGYIYYSGSTDYNPSLKSRVTMSVDTSKNQFSLKVNSVTAADTAVYYCARVSIFGVGTFDYWGQGTLVTVSSGGGGSGGGGSGGGGSGGEIVMTQSPATLSLSPGERATLSCRASQSVSSYLAWYQQKPGQAPRLLIYDASNRATGIPARFSGSGSGTDFTLTISSLEPEDFAVYYCHQYGSTPLTFGGGTKAEIK

SEQ ID NO: 392 - DNA, 360 bp, Homo sapiens
atgtctcgctccgtggccttagctgtgctcgcgctactctctctttctggcctggaggctatccagcgtactccaaagattcaggtttactcacgtcatccagcagagaatggaaagtcaaatttcctgaattgctatgtgtctgggtttcatccatccgacattgaagttgacttactgaagaatggagagagaattgaaaaagtggagcattcagacttgtctttcagcaaggactggtctttctatctcttgtactacactgaattcacccccactgaaaaagatgagtatgcctgccgtgtgaaccatgtgactttgtcacagcccaagatagttaagtgggatcgagacatgtaa

SEQ ID NO: 393 - DNA, 186 bp, Homo sapiens
atgaagcgcttcctcttcctcctactcaccatcagcctcctggttatggtacagatacaaactggactctcaggacaaaacgacaccagccaaaccagcagcccctcagcatccagcaacataagcggaggcattttccttttcttcgtggccaatgccataatccacctcttctgcttcagttga

SEQ ID NO: 394 - DNA, 1508 bp, Homo sapiens
ttttgaaacccttcaaaggcagagacttgtccagcctaacctgcctgctgctcctagctcctgaggctcagggcccttggcttctgtccgctctgctcagggccctccagcgtggccactgctcagccatgctcctgctgctcgtcccagtgctcgaggtgatttttaccctgggaggaaccagagcccagtcggtgacccagcttggcagccacgtctctgtctctgaaggagccctggttctgctgaggtgcaactactcatcgtctgttccaccatatctcttctggtatgtgcaataccccaaccaaggactccagcttctcctgaagtacacatcagcggccaccctggttaaaggcatcaacggttttgaggctgaatttaagaagagtgaaacctccttccacctgacgaaaccctcagcccatatgagcgacgcggctgagtacttctgtgctgtgagtgatctcgaaccgaacagcagtgcttccaagataatctttggatcagggaccagactcagcatccggccaaatatccagaaccctgaccctgccgtgtaccagctgagagactctaaatccagtgacaagtctgtctgcctattcaccgattttgattctcaaacaaatgtgtcacaaagtaaggattctgatgtgtatatcacagacaaaactgtgctagacatgaggtctatggacttcaagagcaacagtgctgtggcctggagcaacaaatctgactttgcatgtgcaaacgccttcaacaacagcattattccagaagacaccttcttccccagcccagaaagttcctgtgatgtcaagctggtcgagaaaagctttgaaacagatacgaacctaaactttcaaaacctgtcagtgattgggttccgaatcctcctcctgaaagtggccgggtttaatctgctcatgacgctgcggctgtggtccagctgagatctgcaagattgtaagacagcctgtgctccctcgctccttcctctgcattgcccctcttctccctctccaaacagagggaactctcctacccccaaggaggtgaaagctgctaccacctctgtgcccccccggtaatgccaccaactggatcctacccgaatttatgattaagattgctgaagagctgccaaacactgctgccaccccctctgttcccttattgctgcttgtcactgcctgacattcacggcagaggcaaggctgctgcagcctcccctggctgtgcacattccctcctgctccccagagactgcctccgccatcccacagatgatggatcttcagtgggttctcttgggctctaggtcctggagaatgttgtgaggggtttatttttttttaatagtgttcataaagaaatacatagtattcttcttctcaagacgtggggggaaattatctcattatcgaggccctgctatgctgtgtgtctgggcgtgttgtatgtcctgctgccgatgccttcattaaaatgatttggaa

SEQ ID NO: 395 - DNA, 462 bp, Homo sapiens
atgagcatcagcctcctgtgctgtgcagcctttcctctcctgtgggcaggtccagtgaatgctggtggtgtcactcagaccccaaaattccgcatcctgaagataggacagagcatgacactgcagtgtgcccaggatatgaaccataactacatgtactggtatcgacaagacccaggcatggggctgaagctgatttattattcagttggtgctggtatcactgacaaaggagaagtcccgaatggatacaacgtctccagatcaaccacagaggatttcccgctcaggctggagttggctgctccctcccagacatctgtgtacttctgtgccagcagtaggggtggggccgggctcaatgagcagttcttcgggccagggacacggctcaccgtgctagaggacctgaaaaaggtgttcccacccgaggtcgctgtgtttgagccatcagaagcttcc

SEQ ID NO: 396 - DNA, 2690 bp, Homo sapiens
agtctagctgctgcacaggctggctggctggctggctgctaagggctgctccacgcttttgccggaggacagagactgacatggaacaggggaagggcctggctgtcctcatcctggctatcattcttcttcaaggtactttggcccagtcaatcaaaggaaaccacttggttaaggtgtatgactatcaagaagatggttcggtacttctgacttgtgatgcagaagccaaaaatatcacatggtttaaagatgggaagatgatcggcttcctaactgaagataaaaaaaaatggaatctgggaagtaatgccaaggaccctcgagggatgtatcagtgtaaaggatcacagaacaagtcaaaaccactccaagtgtattacagaatgtgtcagaactgcattgaactaaatgcagccaccatatctggctttctctttgctgaaatcgtcagcattttcgtccttgctgttggggtctacttcattgctggacaggatggagttcgccagtcgagagcttcagacaagcagactctgttgcccaatgaccagctctaccagcccctcaaggatcgagaagatgaccagtacagccaccttcaaggaaaccagttgaggaggaattgaactcaggactcagagtagtccaggtgttctcctcctattcagttcccagaatcaaagcaatgcattttggaaagctcctagcagagagactttcagccctaaatctagactcaaggttcccagagatgacaaatggagaagaaaggccatcagagcaaatttgggggtttctcaaataaaataaaaataaaaacaaatactgtgtttcagaagcgccacctattggggaaaattgtaaaagaaaaatgaaaagatcaaataaccccctggatttgaatataattttttgtgttgtaatttttatttcgtttttgtataggttataattcacatggctcaaatattcagtgaaagctctccctccaccgccatcccctgctacccagtgaccctgttgccctcttcagagacaaattagtttctcttttttttttttttttttttttttttgagacagtctggctctgtcacccaggctgaaatgcagtggcaccatctcggctcactgcaacctctgcctcctgggttcaagcgattctcctgcctcagcctcccgggcagctgggattacaggcacacactaccacacctggctaatttttgtatttttagtagagacagggttttgctctgttggccaagctggtctcgaactcctgacctcaagtgatccgcccgcctcagcctcccaaagtgctgggattacaggtgtgagccaccatgcctggtcttaaaaccagtttcttatatatctctctggaggtattctaggcatatatgagcacattctcaagtacatattatcctcccttcccctatcttttagacaaatgatatcaaactatacatcttgtgagattattgcataccattatatgaagataccattatatcctttttaatgcaaccatattgtacaaatagactatgatttatttaacctgttatctatcagtggatatttaagttggtagttggttccaatcttttgctcttacaacaattctgcaatgactaacattgtataaatatcatttttaaaaataattgcattgaagcataatgtacatgccataaaatccacccatcttaagtgatttcacctgttctcagaaatttttagtaaatttaactaattgtacagccattaccataatccagctttaggacattttcttttttttcttttcttttcttttttttcttttttttttttttttgaagtggaatcttgctctgtggcccaggctggagtgcagtggcgcgatctcagctcactgcaacctccacctcctgggttcaagcgattctcttgccttggcctcccgagtagctgagactacaggcacatgccaccacgcccagctcattttttgtgtatttagtatttgtgtatctagtatttgtgtacttagtagagacagggtttcaccatgttggccaggctggtctccaattcctgacctcaggcgatccacccgccttgacctcccaaagtgctgggattacaggtgtgagccaccgcgccaggcccgtaactgtattttaatatagccattctatggatttaatatggtattttattatggccttaatttgcatttccctagatactaaccatgctgagtgtcctgtcttgtgtttattaaccattcatatatttttagtgaaatgtgtatcaaatcttttgcccatttttaagttgacttatttgtttgtcttcttactattgggttgcatatgtttttgatataagtcctttatcagatatatgatttggaaatattttctaccaatctgtggtttgtttttcttaatggtgtcttttgaagtgcaaaaggtttgaattttgaagtacattttattgattttttcttctatatattgtgcttttggtatcatgtctaataaatctttaccaaacccacagttacaaagattttctcctgtcttctttttatactttttacagctttatggttttagctctaacaataaatgtgattttgaacatacataagactatttgtaacaaacacaaataaattgaattgttgggca

SEQ ID NO: 397 - DNA, 701 bp, Homo sapiens
ctttccggtacctgtgagtcagctaggggagggcagctctcacccaggctgatagttcggtgacctggctttatctactggatgagttccgctgggagatggaacatagcacgtttctctctggcctggtactggctacccttctctcgcaagtgagccccttcaagatacctatagaggaacttgaggacagagtgtttgtgaattgcaataccagcatcacatgggtagagggaacggtgggaacactgctctcagacattacaagactggacctgggaaaacgcatcctggacccacgaggaatatataggtgtaatgggacagatatatacaaggacaaagaatctaccgtgcaagttcattatcgaatgtgccagagctgtgtggagctggatccagccaccgtggctggcatcattgtcactgatgtcattgccactctgctccttgctttgggagtcttctgctttgctggacatgagactggaaggctgtctggggctgccgacacacaagctctgttgaggaatgaccaggtctatcagcccctccgagatcgagatgatgctcagtacagccaccttggaggaaactgggctcggaacaagtgaacctgagactggtggcttctagaagcagccattaccaactgtaccttcccttcttgctcagccaataaatatatcctctttcactca

SEQ ID NO: 398 - DNA, 1361 bp, Homo sapiens
agaaaccctcctcccctcccagcctcaggtgcctgcttcagaaaatgaagtagtaagtctgctggcctccgccatcttagtaaagtaacagtcccatgaaacaaagatgcagtcgggcactcactggagagttctgggcctctgcctcttatcagttggcgtttgggggcaagatggtaatgaagaaatgggtggtattacacagacaccatataaagtctccatctctggaaccacagtaatattgacatgccctcagtatcctggatctgaaatactatggcaacacaatgataaaaacataggcggtgatgaggatgataaaaacataggcagtgatgaggatcacctgtcactgaaggaattttcagaattggagcaaagtggttattatgtctgctaccccagaggaagcaaaccagaagatgcgaacttttatctctacctgagggcaagagtgtgtgagaactgcatggagatggatgtgatgtcggtggccacaattgtcatagtggacatctgcatcactgggggcttgctgctgctggtttactactggagcaagaatagaaaggccaaggccaagcctgtgacacgaggagcgggtgctggcggcaggcaaaggggacaaaacaaggagaggccaccacctgttcccaacccagactatgagcccatccggaaaggccagcgggacctgtattctggcctgaatcagagacgcatctgaccctctggagaacactgcctcccgctggcccaggtctcctctccagtccccctgcgactccctgtttcctgggctagtcttggaccccacgagagagaatcgttcctcagcctcatggtgaactcgcgccctccagcctgatcccccgctccctcctccctgccttctctgctggtacccagtcctaaaatattgctgcttcctcttcctttgaagcatcatcagtagtcacaccctcacagctggcctgccctcttgccaggatatttatttgtgctattcactcccttccctttggatgtaacttctccgttcagttccctccttttcttgcatgtaagttgtcccccatcccaaagtattccatctacttttctatcgccgtccccttttgcagccctctctggggatggactgggtaaatgttgacagaggccctgccccgttcacagatcctggccctgagccagccctgtgctcctccctcccccaacactccctaccaaccccctaatcccctactccctccaccccccctccactgtaggccactggatggtcatttgcatctccgtaaatgtgctctgctcctcagctgagagagaaaaaaataaactgtatttggctgcaa

SEQ ID NO: 399 - DNA, 1597 bp, Homo sapiens
aaccgtcccggccaccgctgcctcagcctctgcctcccagcctctttctgagggaaaggacaagatgaagtggaaggcgcttttcaccgcggccatcctgcaggcacagttgccgattacagaggcacagagctttggcctgctggatcccaaactctgctacctgctggatggaatcctcttcatctatggtgtcattctcactgccttgttcctgagagtgaagttcagcaggagcgcagacgcccccgcgtaccagcagggccagaaccagctctataacgagctcaatctaggacgaagagaggagtacgatgttttggacaagagacgtggccgggaccctgagatggggggaaagccgagaaggaagaaccctcaggaaggcctgtacaatgaactgcagaaagataagatggcggaggcctacagtgagattgggatgaaaggcgagcgccggaggggcaaggggcacgatggcctttaccagggtctcagtacagccaccaaggacacctacgacgcccttcacatgcaggccctgccccctcgctaacagccaggggatttcaccactcaaaggccagacctgcagacgcccagattatgagacacaggatgaagcatttacaacccggttcactcttctcagccactgaagtattcccctttatgtacaggatgctttggttatatttagctccaaaccttcacacacagactgttgtccctgcactctttaagggagtgtactcccagggcttacggccctggccttgggccctctggtttgccggtggtgcaggtagacctgtctcctggcggttcctcgttctccctgggaggcgggcgcactgcctctcacagctgagttgttgagtctgttttgtaaagtccccagagaaagcgcagatgctagcacatgccctaatgtctgtatcactctgtgtctgagtggcttcactcctgctgtaaatttggcttctgttgtcaccttcacctcctttcaaggtaactgtactgggccatgttgtgcctccctggtgagagggccgggcagaggggcagatggaaaggagcctaggccaggtgcaaccagggagctgcaggggcatgggaaggtgggcgggcaggggagggtcagccagggcctgcgagggcagcgggagcctccctgcctcaggcctctgtgccgcaccattgaactgtaccatgtgctacaggggccagaagatgaacagactgaccttgatgagctgtgcacaaagtggcataaaaaacatgtggttacacagtgtgaataaagtgctgcggagcaagaggaggccgttgattcacttcacgctttcagcgaatgacaaaatcatctttgtgaaggcctcgcaggaagacccaacacatgggacctataactgcccagcggacagtggcaggacaggaaaaacccgtcaatgtactaggatactgctgcgtcattacagggcacaggccatggatggaaaacgctctctactctgctttttttctactgttttaatttatactggcatgctaaagccttcctattttgcataataaatgcttcagtgaaaatgca

SEQ ID NO: 400 - DNA, 21 bp, Homo Sapiens
agagaatggaaagtcaaattt

SEQ ID NO: 401 - DNA, 21 bp, Homo Sapiens
atggacatgatcttctttata

SEQ ID NO: 402 - DNA, 21 bp, Homo Sapiens
tggacatgatcttctttataa

SEQ ID NO: 403 - DNA, 21 bp, Homo Sapiens
ggacatgatcttctttataat

SEQ ID NO: 404 - DNA, 21 bp, Homo Sapiens
tgacaggattattggaaattt

SEQ ID NO: 405 - DNA, 21 bp, Homo Sapiens
ttgtggttaatctggtttatt

SEQ ID NO: 406 - DNA, 21 bp, Homo Sapiens
tgtggttaatctggtttattt

SEQ ID NO: 407 - DNA, 21 bp, Homo Sapiens
gcagagaatggaaagtcaaat

SEQ ID NO: 408 - DNA, 21 bp, Homo Sapiens
cagagaatggaaagtcaaatt

SEQ ID NO: 409 - DNA, 21 bp, Homo Sapiens
gagaatggaaagtcaaatttc

SEQ ID NO: 410 - DNA, 21 bp, Homo Sapiens
gtcacagcccaagatagttaa

SEQ ID NO: 411 - DNA, 21 bp, Homo Sapiens
tgcttatacacttacacttta

SEQ ID NO: 412 - DNA, 21 bp, Homo Sapiens
gcttatacacttacactttat

SEQ ID NO: 413 - DNA, 21 bp, Homo Sapiens
cttatacacttacactttatg

SEQ ID NO: 414 - DNA, 21 bp, Homo Sapiens
acatggacatgatcttcttta

SEQ ID NO: 415 - DNA, 21 bp, Homo Sapiens
catggacatgatcttctttat

SEQ ID NO: 416 - DNA, 21 bp, Homo Sapiens
atcaacatcttggtcagattt

SEQ ID NO: 417 - DNA, 21 bp, Homo Sapiens
cttgcactcaaagcttgttaa

SEQ ID NO: 418 - DNA, 21 bp, Homo Sapiens
agttaagcgtgcataagttaa

SEQ ID NO: 419 - DNA, 21 bp, Homo Sapiens
gcataagttaacttccaattt

SEQ ID NO: 420 - DNA, 21 bp, Homo Sapiens
tacatactctgcttagaattt

SEQ ID NO: 421 - DNA, 21 bp, Homo Sapiens
acatactctgcttagaatttg

SEQ ID NO: 422 - DNA, 21 bp, Homo Sapiens
ttgacaggattattggaaatt

SEQ ID NO: 423 - DNA, 21 bp, Homo Sapiens
gacaggattattggaaatttg

SEQ ID NO: 424 - DNA, 21 bp, Homo Sapiens
taaggcatggttgtggttaat

SEQ ID NO: 425 - DNA, 21 bp, Homo Sapiens
gttgtggttaatctggtttat

SEQ ID NO: 426 - DNA, 21 bp, Homo Sapiens
gttccacaagttaaataaatc

SEQ ID NO: 427 - DNA, 21 bp, Homo Sapiens
tccagcgtactccaaagattc

SEQ ID NO: 428 - DNA, 21 bp, Homo Sapiens
tactccaaagattcaggttta

SEQ ID NO: 429 - DNA, 21 bp, Homo Sapiens
actccaaagattcaggtttac

SEQ ID NO: 430 - DNA, 21 bp, Homo Sapiens
cacgtcatccagcagagaatg

SEQ ID NO: 431 - DNA, 21 bp, Homo Sapiens
ggtttcatccatccgacattg

SEQ ID NO: 432 - DNA, 21 bp, Homo Sapiens
ccgacattgaagttgacttac

SEQ ID NO: 433 - DNA, 21 bp, Homo Sapiens
tgaagaatggagagagaattg

SEQ ID NO: 434 - DNA, 21 bp, Homo Sapiens
gagcattcagacttgtctttc

SEQ ID NO: 435 - DNA, 21 bp, Homo Sapiens
ttcagcaaggactggtctttc

SEQ ID NO: 436 - DNA, 21 bp, Homo Sapiens
gcaaggactggtctttctatc

SEQ ID NO: 437 - DNA, 21 bp, Homo Sapiens
cgtgtgaaccatgtgactttg

SEQ ID NO: 438 - DNA, 21 bp, Homo Sapiens
ctttgtcacagcccaagatag

SEQ ID NO: 439 - DNA, 21 bp, Homo Sapiens
tcacagcccaagatagttaag

SEQ ID NO: 440 - DNA, 21 bp, Homo Sapiens
agtgggatcgagacatgtaag

SEQ ID NO: 441 - DNA, 21 bp, Homo Sapiens
aggtttgaagatgccgcattt

SEQ ID NO: 442 - DNA, 21 bp, Homo Sapiens
ggtttgaagatgccgcatttg

SEQ ID NO: 443 - DNA, 21 bp, Homo Sapiens
ttgatatgcttatacacttac

SEQ ID NO: 444 - DNA, 21 bp, Homo Sapiens
tgagtgctgtctccatgtttg

SEQ ID NO: 445 - DNA, 21 bp, Homo Sapiens
tgtctccatgtttgatgtatc

SEQ ID NO: 446 - DNA, 21 bp, Homo Sapiens
tcaacatcttggtcagatttg

SEQ ID NO: 447 - DNA, 21 bp, Homo Sapiens
tcagatttgaactcttcaatc

SEQ ID NO: 448 - DNA, 21 bp, Homo Sapiens
ttcaatctcttgcactcaaag

SEQ ID NO: 449 - DNA, 21 bp, Homo Sapiens
ttgcactcaaagcttgttaag

SEQ ID NO: 450 - DNA, 21 bp, Homo Sapiens
actcaaagcttgttaagatag

SEQ ID NO: 451 - DNA, 21 bp, Homo Sapiens
agatagttaagcgtgcataag

SEQ ID NO: 452 - DNA, 21 bp, Homo Sapiens
tgcataagttaacttccaatt

SEQ ID NO: 453 - DNA, 21 bp, Homo Sapiens
gttaacttccaatttacatac

SEQ ID NO: 454 - DNA, 21 bp, Homo Sapiens
attgacaggattattggaaat

SEQ ID NO: 455 - DNA, 21 bp, Homo Sapiens
gtaaggcatggttgtggttaa

SEQ ID NO: 456 - DNA, 21 bp, Homo Sapiens
ggttgtggttaatctggttta

SEQ ID NO: 457 - DNA, 21 bp, Homo Sapiens
ttcctgaagctgacagcattc

SEQ ID NO: 458 - DNA, 21 bp, Homo Sapiens
gctatccagcgtactccaaag

SEQ ID NO: 459 - DNA, 21 bp, Homo Sapiens
catccagcagagaatggaaag

SEQ ID NO: 460 - DNA, 21 bp, Homo Sapiens
caaatttcctgaattgctatg

SEQ ID NO: 461 - DNA, 21 bp, Homo Sapiens
attgctatgtgtctgggtttc

SEQ ID NO: 462 - DNA, 21 bp, Homo Sapiens
gaagatgccgcatttggattg

SEQ ID NO: 463 - DNA, 21 bp, Homo Sapiens
caatttacatactctgcttag

SEQ ID NO: 464 - DNA, 21 bp, Homo Sapiens
tatccagcgtactccaaagat

SEQ ID NO: 465 - DNA, 21 bp, Homo Sapiens
atccagcgtactccaaagatt

SEQ ID NO: 466 - DNA, 21 bp, Homo Sapiens
ctccaaagattcaggtttact

SEQ ID NO: 467 - DNA, 21 bp, Homo Sapiens
tgctatgtgtctgggtttcat

SEQ ID NO: 468 - DNA, 21 bp, Homo Sapiens
tttcatccatccgacattgaa

SEQ ID NO: 469 - DNA, 21 bp, Homo Sapiens
gaagttgacttactgaagaat

SEQ ID NO: 470 - DNA, 21 bp, Homo Sapiens
gaagaatggagagagaattga

SEQ ID NO: 471 - DNA, 21 bp, Homo Sapiens
agaatggagagagaattgaaa

SEQ ID NO: 472 - DNA, 21 bp, Homo Sapiens
cagcaaggactggtctttcta

SEQ ID NO: 473 - DNA, 21 bp, Homo Sapiens
agcaaggactggtctttctat

SEQ ID NO: 474 - DNA, 21 bp, Homo Sapiens
actttgtcacagcccaagata

SEQ ID NO: 475 - DNA, 21 bp, Homo Sapiens
ttgtcacagcccaagatagtt

SEQ ID NO: 476 - DNA, 21 bp, Homo Sapiens
tgtcacagcccaagatagtta

SEQ ID NO: 477 - DNA, 21 bp, Homo Sapiens
cacagcccaagatagttaagt

SEQ ID NO: 478 - DNA, 21 bp, Homo Sapiens
gcagcatcatggaggtttgaa

SEQ ID NO: 479 - DNA, 21 bp, Homo Sapiens
ccgcatttggattggatgaat

SEQ ID NO: 480 - DNA, 21 bp, Homo Sapiens
ttgagtgctgtctccatgttt

SEQ ID NO: 481 - DNA, 21 bp, Homo Sapiens
agtgctgtctccatgtttgat

SEQ ID NO: 482 - DNA, 21 bp, Homo Sapiens
ctgtctccatgtttgatgtat

SEQ ID NO: 483 - DNA, 21 bp, Homo Sapiens
tctaggagggctggcaactta

SEQ ID NO: 484 - DNA, 21 bp, Homo Sapiens
caacatcttggtcagatttga

SEQ ID NO: 485 - DNA, 21 bp, Homo Sapiens
gtcagatttgaactcttcaat

SEQ ID NO: 486 - DNA, 21 bp, Homo Sapiens
tcttgcactcaaagcttgtta

SEQ ID NO: 487 - DNA, 21 bp, Homo Sapiens
tgcactcaaagcttgttaaga

SEQ ID NO: 488 - DNA, 21 bp, Homo Sapiens
gcactcaaagcttgttaagat

SEQ ID NO: 489 - DNA, 21 bp, Homo Sapiens
cactcaaagcttgttaagata

SEQ ID NO: 490 - DNA, 21 bp, Homo Sapiens
tcaaagcttgttaagatagtt

SEQ ID NO: 491 - DNA, 21 bp, Homo Sapiens
caaagcttgttaagatagtta

SEQ ID NO: 492 - DNA, 21 bp, Homo Sapiens
gatagttaagcgtgcataagt

SEQ ID NO: 493 - DNA, 21 bp, Homo Sapiens
atagttaagcgtgcataagtt

SEQ ID NO: 494 - DNA, 21 bp, Homo Sapiens
tagttaagcgtgcataagtta

SEQ ID NO: 495 - DNA, 21 bp, Homo Sapiens
ttaagcgtgcataagttaact

SEQ ID NO: 496 - DNA, 21 bp, Homo Sapiens
taagcgtgcataagttaactt

SEQ ID NO: 497 - DNA, 21 bp, Homo Sapiens
atttacatactctgcttagaa

SEQ ID NO: 498 - DNA, 21 bp, Homo Sapiens
tttacatactctgcttagaat

SEQ ID NO: 499 - DNA, 21 bp, Homo Sapiens
acaggattattggaaatttgt

SEQ ID NO: 500 - DNA, 21 bp, Homo Sapiens
caggattattggaaatttgtt

SEQ ID NO: 501 - DNA, 21 bp, Homo Sapiens
aggcatggttgtggttaatct

SEQ ID NO: 502 - DNA, 21 bp, Homo Sapiens
cagcagagaatggaaagtcaa

SEQ ID NO: 503 - DNA, 21 bp, Homo Sapiens
tccgacattgaagttgactta

SEQ ID NO: 504 - DNA, 21 bp, Homo Sapiens
ctggtctttctatctcttgta

SEQ ID NO: 505 - DNA, 21 bp, Homo Sapiens
ccgtgtgaaccatgtgacttt

SEQ ID NO: 506 - DNA, 21 bp, Homo Sapiens
cccaagatagttaagtgggat

SEQ ID NO: 507 - DNA, 21 bp, Homo Sapiens
ggttgctccacaggtagctct

SEQ ID NO: 508 - DNA, 21 bp, Homo Sapiens
gctccacaggtagctctagga

SEQ ID NO: 509 - DNA, 21 bp, Homo Sapiens
gggagcagagaattctcttat

SEQ ID NO: 510 - DNA, 21 bp, Homo Sapiens
ggagcagagaattctcttatc

SEQ ID NO: 511 - DNA, 21 bp, Homo Sapiens
gagcagagaattctcttatcc

SEQ ID NO: 512 - DNA, 21 bp, Homo Sapiens
gagaattctcttatccaacat

SEQ ID NO: 513 - DNA, 21 bp, Homo Sapiens
gaattctcttatccaacatca

SEQ ID NO: 514 - DNA, 21 bp, Homo Sapiens
aagtggagcattcagacttgt

SEQ ID NO: 515 - DNA, 21 bp, Homo Sapiens
aaggactggtctttctatctc

SEQ ID NO: 516 - DNA, 21 bp, Homo Sapiens
aagcttgttaagatagttaag

SEQ ID NO: 517 - DNA, 21 bp, Homo Sapiens
aagcgtgcataagttaacttc

SEQ ID NO: 518 - DNA, 21 bp, Homo Sapiens
aagatgccgcatttggattgg

SEQ ID NO: 519 - DNA, 21 bp, Homo Sapiens
aagaatggagagagaattgaa

SEQ ID NO: 520 - DNA, 21 bp, Homo Sapiens
aacatcaacatcttggtcaga

SEQ ID NO: 521 - DNA, 21 bp, Homo Sapiens
aaggcatggttgtggttaatc

SEQ ID NO: 522 - DNA, 21 bp, Homo Sapiens
aagcagcatcatggaggtttg

SEQ ID NO: 523 - DNA, 21 bp, Homo Sapiens
aagatgagtatgcctgccgtg

SEQ ID NO: 524 - DNA, 21 bp, Homo Sapiens
aagttgacttactgaagaatg

SEQ ID NO: 525 - DNA, 21 bp, Homo Sapiens
aagatagttaagcgtgcataa

SEQ ID NO: 526 - DNA, 21 bp, Homo Sapiens
aacttccaatttacatactct

SEQ ID NO: 527 - DNA, 21 bp, Homo Sapiens
aacatcttggtcagatttgaa

SEQ ID NO: 528 - DNA, 21 bp, Homo Sapiens
aactcttcaatctcttgcact

SEQ ID NO: 529 - DNA, 21 bp, Homo Sapiens
aatttcctgaattgctatgtg

SEQ ID NO: 530 - DNA, 21 bp, Homo Sapiens
aatggaaagtcaaatttcctg

SEQ ID NO: 531 - DNA, 21 bp, Homo Sapiens
aaccatgtgactttgtcacag

SEQ ID NO: 532 - DNA, 21 bp, Homo Sapiens
aattgacaggattattggaaa

SEQ ID NO: 533 - DNA, 21 bp, Homo Sapiens
aattctcttatccaacatcaa

SEQ ID NO: 534 - DNA, 21 bp, Homo Sapiens
aaagtggagcattcagacttg

SEQ ID NO: 535 - DNA, 21 bp, Homo Sapiens
aaagtcaaatttcctgaattg

SEQ ID NO: 536 - DNA, 21 bp, Homo Sapiens
gttgctccacaggtagctcta

SEQ ID NO: 537 - DNA, 21 bp, Homo Sapiens
aatttacatactctgcttaga

SEQ ID NO: 538 - DNA, 21 bp, Homo Sapiens
attcctgaagctgacagcatt

SEQ ID NO: 539 - DNA, 21 bp, Homo Sapiens
tgctcgcgctactctctcttt

SEQ ID NO: 540 - DNA, 21 bp, Homo Sapiens
ctcgcgctactctctctttct

SEQ ID NO: 541 - DNA, 21 bp, Homo Sapiens
tcgcgctactctctctttctg

SEQ ID NO: 542 - DNA, 21 bp, Homo Sapiens
ggctatccagcgtactccaaa

SEQ ID NO: 543 - DNA, 21 bp, Homo Sapiens
ctatccagcgtactccaaaga

SEQ ID NO: 544 - DNA, 21 bp, Homo Sapiens
ccagcgtactccaaagattca

SEQ ID NO: 545 - DNA, 21 bp, Homo Sapiens
cagcgtactccaaagattcag

SEQ ID NO: 546 - DNA, 21 bp, Homo Sapiens
gtactccaaagattcaggttt

SEQ ID NO: 547 - DNA, 21 bp, Homo Sapiens
tccaaagattcaggtttactc

SEQ ID NO: 548 - DNA, 21 bp, Homo Sapiens
ctcacgtcatccagcagagaa

SEQ ID NO: 549 - DNA, 21 bp, Homo Sapiens
tcacgtcatccagcagagaat

SEQ ID NO: 550 - DNA, 21 bp, Homo Sapiens
tcatccagcagagaatggaaa

SEQ ID NO: 551 - DNA, 21 bp, Homo Sapiens
atccagcagagaatggaaagt

SEQ ID NO: 552 - DNA, 21 bp, Homo Sapiens
tccagcagagaatggaaagtc

SEQ ID NO: 553 - DNA, 21 bp, Homo Sapiens
agcagagaatggaaagtcaaa

SEQ ID NO: 554 - DNA, 21 bp, Homo Sapiens
tcaaatttcctgaattgctat

SEQ ID NO: 555 - DNA, 21 bp, Homo Sapiens
ttgctatgtgtctgggtttca

SEQ ID NO: 556 - DNA, 21 bp, Homo Sapiens
gctatgtgtctgggtttcatc

SEQ ID NO: 557 - DNA, 21 bp, Homo Sapiens
gggtttcatccatccgacatt

SEQ ID NO: 558 - DNA, 21 bp, Homo Sapiens
gtttcatccatccgacattga

SEQ ID NO: 559 - DNA, 21 bp, Homo Sapiens
ttcatccatccgacattgaag

SEQ ID NO: 560 - DNA, 21 bp, Homo Sapiens
tcatccatccgacattgaagt

SEQ ID NO: 561 - DNA, 21 bp, Homo Sapiens
catccatccgacattgaagtt

SEQ ID NO: 562 - DNA, 21 bp, Homo Sapiens
atccatccgacattgaagttg

SEQ ID NO: 563 - DNA, 21 bp, Homo Sapiens
tccatccgacattgaagttga

SEQ ID NO: 564 - DNA, 21 bp, Homo Sapiens
atccgacattgaagttgactt

SEQ ID NO: 565 - DNA, 21 bp, Homo Sapiens
cgacattgaagttgacttact

SEQ ID NO: 566 - DNA, 21 bp, Homo Sapiens
gacattgaagttgacttactg

SEQ ID NO: 567 - DNA, 21 bp, Homo Sapiens
cattgaagttgacttactgaa

SEQ ID NO: 568 - DNA, 21 bp, Homo Sapiens
ttgaagttgacttactgaaga

SEQ ID NO: 569 - DNA, 21 bp, Homo Sapiens
tgaagttgacttactgaagaa

SEQ ID NO: 570 - DNA, 21 bp, Homo Sapiens
tactgaagaatggagagagaa

SEQ ID NO: 571 - DNA, 21 bp, Homo Sapiens
actgaagaatggagagagaat

SEQ ID NO: 572 - DNA, 21 bp, Homo Sapiens
tggagcattcagacttgtctt

SEQ ID NO: 573 - DNA, 21 bp, Homo Sapiens
ggagcattcagacttgtcttt

SEQ ID NO: 574 - DNA, 21 bp, Homo Sapiens
agcattcagacttgtctttca

SEQ ID NO: 575 - DNA, 21 bp, Homo Sapiens
gcattcagacttgtctttcag

SEQ ID NO: 576 - DNA, 21 bp, Homo Sapiens
tttcagcaaggactggtcttt

SEQ ID NO: 577 - DNA, 21 bp, Homo Sapiens
tcagcaaggactggtctttct

SEQ ID NO: 578 - DNA, 21 bp, Homo Sapiens
caaggactggtctttctatct

SEQ ID NO: 579 - DNA, 21 bp, Homo Sapiens
ggactggtctttctatctctt

SEQ ID NO: 580 - DNA, 21 bp, Homo Sapiens
actggtctttctatctcttgt

SEQ ID NO: 581 - DNA, 21 bp, Homo Sapiens
tggtctttctatctcttgtac

SEQ ID NO: 582 - DNA, 21 bp, Homo Sapiens
ggtctttctatctcttgtact

SEQ ID NO: 583 - DNA, 21 bp, Homo Sapiens
gtctttctatctcttgtacta

SEQ ID NO: 584 - DNA, 21 bp, Homo Sapiens
tctttctatctcttgtactac

SEQ ID NO: 585 - DNA, 21 bp, Homo Sapiens
ctttctatctcttgtactaca

SEQ ID NO: 586 - DNA, 21 bp, Homo Sapiens
tatctcttgtactacactgaa

SEQ ID NO: 587 - DNA, 21 bp, Homo Sapiens
atctcttgtactacactgaat

SEQ ID NO: 588 - DNA, 21 bp, Homo Sapiens
tgagtatgcctgccgtgtgaa

SEQ ID NO: 589 - DNA, 21 bp, Homo Sapiens
gccgtgtgaaccatgtgactt

SEQ ID NO: 590 - DNA, 21 bp, Homo Sapiens
gtgtgaaccatgtgactttgt

SEQ ID NO: 591 - DNA, 21 bp, Homo Sapiens
tgtgaaccatgtgactttgtc

SEQ ID NO: 592 - DNA, 21 bp, Homo Sapiens
gactttgtcacagcccaagat

SEQ ID NO: 593 - DNA, 21 bp, Homo Sapiens
tttgtcacagcccaagatagt

SEQ ID NO: 594 - DNA, 21 bp, Homo Sapiens
acagcccaagatagttaagtg

SEQ ID NO: 595 - DNA, 21 bp, Homo Sapiens
agttaagtgggatcgagacat

SEQ ID NO: 596 - DNA, 21 bp, Homo Sapiens
ttaagtgggatcgagacatgt

SEQ ID NO: 597 - DNA, 21 bp, Homo Sapiens
taagtgggatcgagacatgta

SEQ ID NO: 598 - DNA, 21 bp, Homo Sapiens
gagacatgtaagcagcatcat

SEQ ID NO: 599 - DNA, 21 bp, Homo Sapiens
agacatgtaagcagcatcatg

SEQ ID NO: 600 - DNA, 21 bp, Homo Sapiens
taagcagcatcatggaggttt

SEQ ID NO: 601 - DNA, 21 bp, Homo Sapiens
agcagcatcatggaggtttga

SEQ ID NO: 602 - DNA, 21 bp, Homo Sapiens
cagcatcatggaggtttgaag

SEQ ID NO: 603 - DNA, 21 bp, Homo Sapiens
agcatcatggaggtttgaaga

SEQ ID NO: 604 - DNA, 21 bp, Homo Sapiens
gcatcatggaggtttgaagat

SEQ ID NO: 605 - DNA, 21 bp, Homo Sapiens
catcatggaggtttgaagatg

SEQ ID NO: 606 - DNA, 21 bp, Homo Sapiens
gtttgaagatgccgcatttgg

SEQ ID NO: 607 - DNA, 21 bp, Homo Sapiens
tgaagatgccgcatttggatt

SEQ ID NO: 608 - DNA, 21 bp, Homo Sapiens
gccgcatttggattggatgaa

SEQ ID NO: 609 - DNA, 21 bp, Homo Sapiens
caaattctgcttgcttgcttt

SEQ ID NO: 610 - DNA, 21 bp, Homo Sapiens
tgatatgcttatacacttaca

SEQ ID NO: 611 - DNA, 21 bp, Homo Sapiens
gatatgcttatacacttacac

SEQ ID NO: 612 - DNA, 21 bp, Homo Sapiens
tatgcttatacacttacactt

SEQ ID NO: 613 - DNA, 21 bp, Homo Sapiens
atgcttatacacttacacttt

SEQ ID NO: 614 - DNA, 21 bp, Homo Sapiens
ttatacacttacactttatgc

SEQ ID NO: 615 - DNA, 21 bp, Homo Sapiens
cacttacactttatgcacaaa

SEQ ID NO: 616 - DNA, 21 bp, Homo Sapiens
ataatgttaacatggacatga

SEQ ID NO: 617 - DNA, 21 bp, Homo Sapiens
taatgttaacatggacatgat

SEQ ID NO: 618 - DNA, 21 bp, Homo Sapiens
atgttaacatggacatgatct

SEQ ID NO: 619 - DNA, 21 bp, Homo Sapiens
tgttaacatggacatgatctt

SEQ ID NO: 620 - DNA, 21 bp, Homo Sapiens
gttaacatggacatgatcttc

SEQ ID NO: 621 - DNA, 21 bp, Homo Sapiens
ttaacatggacatgatcttct

SEQ ID NO: 622 - DNA, 21 bp, Homo Sapiens
taacatggacatgatcttctt

SEQ ID NO: 623 - DNA, 21 bp, Homo Sapiens
tttgagtgctgtctccatgtt

SEQ ID NO: 624 - DNA, 21 bp, Homo Sapiens
gagtgctgtctccatgtttga

SEQ ID NO: 625 - DNA, 21 bp, Homo Sapiens
gtgctgtctccatgtttgatg

SEQ ID NO: 626 - DNA, 21 bp, Homo Sapiens
tgctgtctccatgtttgatgt

SEQ ID NO: 627 - DNA, 21 bp, Homo Sapiens
gctgtctccatgtttgatgta

SEQ ID NO: 628 - DNA, 21 bp, Homo Sapiens
gtctccatgtttgatgtatct

SEQ ID NO: 629 - DNA, 21 bp, Homo Sapiens
tctccatgtttgatgtatctg

SEQ ID NO: 630 - DNA, 21 bp, Homo Sapiens
taggagggctggcaacttaga

SEQ ID NO: 631 - DNA, 21 bp, Homo Sapiens
attctcttatccaacatcaac

SEQ ID NO: 632 - DNA, 21 bp, Homo Sapiens
ttctcttatccaacatcaaca

SEQ ID NO: 633 - DNA, 21 bp, Homo Sapiens
tctcttatccaacatcaacat

SEQ ID NO: 634 - DNA, 21 bp, Homo Sapiens
ctcttatccaacatcaacatc

SEQ ID NO: 635 - DNA, 21 bp, Homo Sapiens
tcttatccaacatcaacatct

SEQ ID NO: 636 - DNA, 21 bp, Homo Sapiens
cttatccaacatcaacatctt

SEQ ID NO: 637 - DNA, 21 bp, Homo Sapiens
ttatccaacatcaacatcttg

SEQ ID NO: 638 - DNA, 21 bp, Homo Sapiens
acatcaacatcttggtcagat

SEQ ID NO: 639 - DNA, 21 bp, Homo Sapiens
catcaacatcttggtcagatt

SEQ ID NO: 640 - DNA, 21 bp, Homo Sapiens
acatcttggtcagatttgaac

SEQ ID NO: 641 - DNA, 21 bp, Homo Sapiens
catcttggtcagatttgaact

SEQ ID NO: 642 - DNA, 21 bp, Homo Sapiens
cttggtcagatttgaactctt

SEQ ID NO: 643 - DNA, 21 bp, Homo Sapiens
tggtcagatttgaactcttca

SEQ ID NO: 644 - DNA, 21 bp, Homo Sapiens
ggtcagatttgaactcttcaa

SEQ ID NO: 645 - DNA, 21 bp, Homo Sapiens
atttgaactcttcaatctctt

SEQ ID NO: 646 - DNA, 21 bp, Homo Sapiens
tcttcaatctcttgcactcaa

SEQ ID NO: 647 - DNA, 21 bp, Homo Sapiens
cttcaatctcttgcactcaaa

SEQ ID NO: 648 - DNA, 21 bp, Homo Sapiens
ctcttgcactcaaagcttgtt

SEQ ID NO: 649 - DNA, 21 bp, Homo Sapiens
ctcaaagcttgttaagatagt

SEQ ID NO: 650 - DNA, 21 bp, Homo Sapiens
agcttgttaagatagttaagc

SEQ ID NO: 651 - DNA, 21 bp, Homo Sapiens
taagatagttaagcgtgcata

SEQ ID NO: 652 - DNA, 21 bp, Homo Sapiens
gtgcataagttaacttccaat

SEQ ID NO: 653 - DNA, 21 bp, Homo Sapiens
taacttccaatttacatactc

SEQ ID NO: 654 - DNA, 21 bp, Homo Sapiens
ccaatttacatactctgctta

SEQ ID NO: 655 - DNA, 21 bp, Homo Sapiens
catactctgcttagaatttgg

SEQ ID NO: 656 - DNA, 21 bp, Homo Sapiens
agtaaggcatggttgtggtta

SEQ ID NO: 657 - DNA, 21 bp, Homo Sapiens
ggcatggttgtggttaatctg

SEQ ID NO: 658 - DNA, 21 bp, Homo Sapiens
tggttgtggttaatctggttt

SEQ ID NO: 659 - DNA, 21 bp, Homo Sapiens
tcctgaagctgacagcattcg

SEQ ID NO: 660 - DNA, 21 bp, Homo Sapiens
tctttctggcctggaggctat

SEQ ID NO: 661 - DNA, 21 bp, Homo Sapiens
caaagattcaggtttactcac

SEQ ID NO: 662 - DNA, 21 bp, Homo Sapiens
attcaggtttactcacgtcat

SEQ ID NO: 663 - DNA, 21 bp, Homo Sapiens
ttcaggtttactcacgtcatc

SEQ ID NO: 664 - DNA, 21 bp, Homo Sapiens
tcaggtttactcacgtcatcc

SEQ ID NO: 665 - DNA, 21 bp, Homo Sapiens
acgtcatccagcagagaatgg

SEQ ID NO: 666 - DNA, 21 bp, Homo Sapiens
tttcctgaattgctatgtgtc

SEQ ID NO: 667 - DNA, 21 bp, Homo Sapiens
tcctgaattgctatgtgtctg

SEQ ID NO: 668 - DNA, 21 bp, Homo Sapiens
ctatgtgtctgggtttcatcc

SEQ ID NO: 669 - DNA, 21 bp, Homo Sapiens
tgtgtctgggtttcatccatc

SEQ ID NO: 670 - DNA, 21 bp, Homo Sapiens
tgggtttcatccatccgacat

SEQ ID NO: 671 - DNA, 21 bp, Homo Sapiens
ccatccgacattgaagttgac

SEQ ID NO: 672 - DNA, 21 bp, Homo Sapiens
attgaagttgacttactgaag

SEQ ID NO: 673 - DNA, 21 bp, Homo Sapiens
agttgacttactgaagaatgg

SEQ ID NO: 674 - DNA, 21 bp, Homo Sapiens
cttactgaagaatggagagag

SEQ ID NO: 675 - DNA, 21 bp, Homo Sapiens
agtggagcattcagacttgtc

SEQ ID NO: 676 - DNA, 21 bp, Homo Sapiens
tcagacttgtctttcagcaag

SEQ ID NO: 677 - DNA, 21 bp, Homo Sapiens
ctttcagcaaggactggtctt

SEQ ID NO: 678 - DNA, 21 bp, Homo Sapiens
gactggtctttctatctcttg

SEQ ID NO: 679 - DNA, 21 bp, Homo Sapiens
tttctatctcttgtactacac

SEQ ID NO: 680 - DNA, 21 bp, Homo Sapiens
tctatctcttgtactacactg

SEQ ID NO: 681 - DNA, 21 bp, Homo Sapiens
tgaaccatgtgactttgtcac

SEQ ID NO: 682 - DNA, 21 bp, Homo Sapiens
cctgaagctgacagcattcgg

SEQ ID NO: 683 - DNA, 21 bp, Homo Sapiens
ctgaagctgacagcattcggg

SEQ ID NO: 684 - DNA, 21 bp, Homo Sapiens
tgaagctgacagcattcgggc

SEQ ID NO: 685 - DNA, 21 bp, Homo Sapiens
atgtctcgctccgtggcctta

SEQ ID NO: 686 - DNA, 21 bp, Homo Sapiens
cttagctgtgctcgcgctact

SEQ ID NO: 687 - DNA, 21 bp, Homo Sapiens
ttagctgtgctcgcgctactc

SEQ ID NO: 688 - DNA, 21 bp, Homo Sapiens
tagctgtgctcgcgctactct

SEQ ID NO: 689 - DNA, 21 bp, Homo Sapiens
tgtgctcgcgctactctctct

SEQ ID NO: 690 - DNA, 21 bp, Homo Sapiens
gtgctcgcgctactctctctt

SEQ ID NO: 691 - DNA, 21 bp, Homo Sapiens
gctcgcgctactctctctttc

SEQ ID NO: 692 - DNA, 21 bp, Homo Sapiens
cgcgctactctctctttctgg

SEQ ID NO: 693 - DNA, 21 bp, Homo Sapiens
gcgctactctctctttctggc

SEQ ID NO: 694 - DNA, 21 bp, Homo Sapiens
cgctactctctctttctggcc

SEQ ID NO: 695 - DNA, 21 bp, Homo Sapiens
gctactctctctttctggcct

SEQ ID NO: 696 - DNA, 21 bp, Homo Sapiens
ctactctctctttctggcctg

SEQ ID NO: 697 - DNA, 21 bp, Homo Sapiens
tactctctctttctggcctgg

SEQ ID NO: 698 - DNA, 21 bp, Homo Sapiens
actctctctttctggcctgga

SEQ ID NO: 699 - DNA, 21 bp, Homo Sapiens
ctctctctttctggcctggag

SEQ ID NO: 700 - DNA, 21 bp, Homo Sapiens
tctctctttctggcctggagg

SEQ ID NO: 701 - DNA, 21 bp, Homo Sapiens
tctctttctggcctggaggct

SEQ ID NO: 702 - DNA, 21 bp, Homo Sapiens
ctctttctggcctggaggcta

SEQ ID NO: 703 - DNA, 21 bp, Homo Sapiens
ctttctggcctggaggctatc

SEQ ID NO: 704 - DNA, 21 bp, Homo Sapiens
tttctggcctggaggctatcc

SEQ ID NO: 705 - DNA, 21 bp, Homo Sapiens
ttctggcctggaggctatcca

SEQ ID NO: 706 - DNA, 21 bp, Homo Sapiens
ctggaggctatccagcgtact

SEQ ID NO: 707 - DNA, 21 bp, Homo Sapiens
tggaggctatccagcgtactc

SEQ ID NO: 708 - DNA, 21 bp, Homo Sapiens
gaggctatccagcgtactcca

SEQ ID NO: 709 - DNA, 21 bp, Homo Sapiens
aggctatccagcgtactccaa

SEQ ID NO: 710 - DNA, 21 bp, Homo Sapiens
agcgtactccaaagattcagg

SEQ ID NO: 711 - DNA, 21 bp, Homo Sapiens
gcgtactccaaagattcaggt

SEQ ID NO: 712 - DNA, 21 bp, Homo Sapiens
cgtactccaaagattcaggtt

SEQ ID NO: 713 - DNA, 21 bp, Homo Sapiens
ccaaagattcaggtttactca

SEQ ID NO: 714 - DNA, 21 bp, Homo Sapiens
aaagattcaggtttactcacg

SEQ ID NO: 715 - DNA, 21 bp, Homo Sapiens
aagattcaggtttactcacgt

SEQ ID NO: 716 - DNA, 21 bp, Homo Sapiens
agattcaggtttactcacgtc

SEQ ID NO: 717 - DNA, 21 bp, Homo Sapiens
gattcaggtttactcacgtca

SEQ ID NO: 718 - DNA, 21 bp, Homo Sapiens
caggtttactcacgtcatcca

SEQ ID NO: 719 - DNA, 21 bp, Homo Sapiens
aggtttactcacgtcatccag

SEQ ID NO: 720 - DNA, 21 bp, Homo Sapiens
ggtttactcacgtcatccagc

SEQ ID NO: 721 - DNA, 21 bp, Homo Sapiens
gtttactcacgtcatccagca

SEQ ID NO: 722 - DNA, 21 bp, Homo Sapiens
tttactcacgtcatccagcag

SEQ ID NO: 723 - DNA, 21 bp, Homo Sapiens
ttactcacgtcatccagcaga

SEQ ID NO: 724 - DNA, 21 bp, Homo Sapiens
tactcacgtcatccagcagag

SEQ ID NO: 725 - DNA, 21 bp, Homo Sapiens
actcacgtcatccagcagaga

SEQ ID NO: 726 - DNA, 21 bp, Homo Sapiens
cgtcatccagcagagaatgga

SEQ ID NO: 727 - DNA, 21 bp, Homo Sapiens
gtcatccagcagagaatggaa

SEQ ID NO: 728 - DNA, 21 bp, Homo Sapiens
ccagcagagaatggaaagtca

SEQ ID NO: 729 - DNA, 21 bp, Homo Sapiens
agaatggaaagtcaaatttcc

SEQ ID NO: 730 - DNA, 21 bp, Homo Sapiens
gaatggaaagtcaaatttcct

SEQ ID NO: 731 - DNA, 21 bp, Homo Sapiens
atggaaagtcaaatttcctga

SEQ ID NO: 732 - DNA, 21 bp, Homo Sapiens
tggaaagtcaaatttcctgaa

SEQ ID NO: 733 - DNA, 21 bp, Homo Sapiens
ggaaagtcaaatttcctgaat

SEQ ID NO: 734 - DNA, 21 bp, Homo Sapiens
gaaagtcaaatttcctgaatt

SEQ ID NO: 735 - DNA, 21 bp, Homo Sapiens
aagtcaaatttcctgaattgc

SEQ ID NO: 736 - DNA, 21 bp, Homo Sapiens
agtcaaatttcctgaattgct

SEQ ID NO: 737 - DNA, 21 bp, Homo Sapiens
gtcaaatttcctgaattgcta

SEQ ID NO: 738 - DNA, 21 bp, Homo Sapiens
aaatttcctgaattgctatgt

SEQ ID NO: 739 - DNA, 21 bp, Homo Sapiens
atttcctgaattgctatgtgt

SEQ ID NO: 740 - DNA, 21 bp, Homo Sapiens
ttcctgaattgctatgtgtct

SEQ ID NO: 741 - DNA, 21 bp, Homo Sapiens
cctgaattgctatgtgtctgg

SEQ ID NO: 742 - DNA, 21 bp, Homo Sapiens
ctgaattgctatgtgtctggg

SEQ ID NO: 743 - DNA, 21 bp, Homo Sapiens
tgaattgctatgtgtctgggt

SEQ ID NO: 744 - DNA, 21 bp, Homo Sapiens
gaattgctatgtgtctgggtt

SEQ ID NO: 745 - DNA, 21 bp, Homo Sapiens
aattgctatgtgtctgggttt

SEQ ID NO: 746 - DNA, 21 bp, Homo Sapiens
tatgtgtctgggtttcatcca

SEQ ID NO: 747 - DNA, 21 bp, Homo Sapiens
atgtgtctgggtttcatccat

SEQ ID NO: 748 - DNA, 21 bp, Homo Sapiens
gtgtctgggtttcatccatcc

SEQ ID NO: 749 - DNA, 21 bp, Homo Sapiens
tgtctgggtttcatccatccg

SEQ ID NO: 750 - DNA, 21 bp, Homo Sapiens
gtctgggtttcatccatccga

SEQ ID NO: 751 - DNA, 21 bp, Homo Sapiens
tctgggtttcatccatccgac

SEQ ID NO: 752 - DNA, 21 bp, Homo Sapiens
ctgggtttcatccatccgaca

SEQ ID NO: 753 - DNA, 21 bp, Homo Sapiens
catccgacattgaagttgact

SEQ ID NO: 754 - DNA, 21 bp, Homo Sapiens
acattgaagttgacttactga

SEQ ID NO: 755 - DNA, 21 bp, Homo Sapiens
gttgacttactgaagaatgga

SEQ ID NO: 756 - DNA, 21 bp, Homo Sapiens
ttgacttactgaagaatggag

SEQ ID NO: 757 - DNA, 21 bp, Homo Sapiens
tgacttactgaagaatggaga

SEQ ID NO: 758 - DNA, 21 bp, Homo Sapiens
gacttactgaagaatggagag

SEQ ID NO: 759 - DNA, 21 bp, Homo Sapiens
acttactgaagaatggagaga

SEQ ID NO: 760 - DNA, 21 bp, Homo Sapiens
ttactgaagaatggagagaga

SEQ ID NO: 761 - DNA, 21 bp, Homo Sapiens
ctgaagaatggagagagaatt

SEQ ID NO: 762 - DNA, 21 bp, Homo Sapiens
gtggagcattcagacttgtct

SEQ ID NO: 763 - DNA, 21 bp, Homo Sapiens
cattcagacttgtctttcagc

SEQ ID NO: 764 - DNA, 21 bp, Homo Sapiens
attcagacttgtctttcagca

SEQ ID NO: 765 - DNA, 21 bp, Homo Sapiens
ttcagacttgtctttcagcaa

SEQ ID NO: 766 - DNA, 21 bp, Homo Sapiens
cagacttgtctttcagcaagg

SEQ ID NO: 767 - DNA, 21 bp, Homo Sapiens
agacttgtctttcagcaagga

SEQ ID NO: 768 - DNA, 21 bp, Homo Sapiens
gacttgtctttcagcaaggac

SEQ ID NO: 769 - DNA, 21 bp, Homo Sapiens
acttgtctttcagcaaggact

SEQ ID NO: 770 - DNA, 21 bp, Homo Sapiens
cttgtctttcagcaaggactg

SEQ ID NO: 771 - DNA, 21 bp, Homo Sapiens
ttgtctttcagcaaggactgg

SEQ ID NO: 772 - DNA, 21 bp, Homo Sapiens
tgtctttcagcaaggactggt

SEQ ID NO: 773 - DNA, 21 bp, Homo Sapiens
gtctttcagcaaggactggtc

SEQ ID NO: 774 - DNA, 21 bp, Homo Sapiens
tctttcagcaaggactggtct

SEQ ID NO: 775 - DNA, 21 bp, Homo Sapiens
aggactggtctttctatctct

SEQ ID NO: 776 - DNA, 21 bp, Homo Sapiens
ttctatctcttgtactacact

SEQ ID NO: 777 - DNA, 21 bp, Homo Sapiens
ctatctcttgtactacactga

SEQ ID NO: 778 - DNA, 21 bp, Homo Sapiens
tctcttgtactacactgaatt

SEQ ID NO: 779 - DNA, 21 bp, Homo Sapiens
ctcttgtactacactgaattc

SEQ ID NO: 780 - DNA, 21 bp, Homo Sapiens
tcttgtactacactgaattca

SEQ ID NO: 781 - DNA, 21 bp, Homo Sapiens
cttgtactacactgaattcac

SEQ ID NO: 782 - DNA, 21 bp, Homo Sapiens
ttgtactacactgaattcacc

SEQ ID NO: 783 - DNA, 21 bp, Homo Sapiens
tgtactacactgaattcaccc

SEQ ID NO: 784 - DNA, 21 bp, Homo Sapiens
aaagatgagtatgcctgccgt

SEQ ID NO: 785 - DNA, 21 bp, Homo Sapiens
agatgagtatgcctgccgtgt

SEQ ID NO: 786 - DNA, 21 bp, Homo Sapiens
gatgagtatgcctgccgtgtg

SEQ ID NO: 787 - DNA, 21 bp, Homo Sapiens
atgagtatgcctgccgtgtga

SEQ ID NO: 788 - DNA, 21 bp, Homo Sapiens
gagtatgcctgccgtgtgaac

SEQ ID NO: 789 - DNA, 21 bp, Homo Sapiens
agtatgcctgccgtgtgaacc

SEQ ID NO: 790 - DNA, 21 bp, Homo Sapiens
gtatgcctgccgtgtgaacca

SEQ ID NO: 791 - DNA, 21 bp, Homo Sapiens
tatgcctgccgtgtgaaccat

SEQ ID NO: 792 - DNA, 21 bp, Homo Sapiens
atgcctgccgtgtgaaccatg

SEQ ID NO: 793 - DNA, 21 bp, Homo Sapiens
tgcctgccgtgtgaaccatgt

SEQ ID NO: 794 - DNA, 21 bp, Homo Sapiens
cctgccgtgtgaaccatgtga

SEQ ID NO: 795 - DNA, 21 bp, Homo Sapiens
ctgccgtgtgaaccatgtgac

SEQ ID NO: 796 - DNA, 21 bp, Homo Sapiens
tgccgtgtgaaccatgtgact

SEQ ID NO: 797 - DNA, 21 bp, Homo Sapiens
gtgaaccatgtgactttgtca

SEQ ID NO: 798 - DNA, 21 bp, Homo Sapiens
gaaccatgtgactttgtcaca

SEQ ID NO: 799 - DNA, 21 bp, Homo Sapiens
accatgtgactttgtcacagc

SEQ ID NO: 800 - DNA, 21 bp, Homo Sapiens
ccatgtgactttgtcacagcc

SEQ ID NO: 801 - DNA, 21 bp, Homo Sapiens
catgtgactttgtcacagccc

SEQ ID NO: 802 - DNA, 21 bp, Homo Sapiens
atgtgactttgtcacagccca

SEQ ID NO: 803 - DNA, 21 bp, Homo Sapiens
tgtgactttgtcacagcccaa

SEQ ID NO: 804 - DNA, 21 bp, Homo Sapiens
gtgactttgtcacagcccaag

SEQ ID NO: 805 - DNA, 21 bp, Homo Sapiens
tgactttgtcacagcccaaga

SEQ ID NO: 806 - DNA, 21 bp, Homo Sapiens
cagcccaagatagttaagtgg

SEQ ID NO: 807 - DNA, 21 bp, Homo Sapiens
agcccaagatagttaagtggg

SEQ ID NO: 808 - DNA, 21 bp, Homo Sapiens
gcccaagatagttaagtggga

SEQ ID NO: 809 - DNA, 21 bp, Homo Sapiens
ccaagatagttaagtgggatc

SEQ ID NO: 810 - DNA, 21 bp, Homo Sapiens
caagatagttaagtgggatcg

SEQ ID NO: 811 - DNA, 21 bp, Homo Sapiens
aagatagttaagtgggatcga

SEQ ID NO: 812 - DNA, 21 bp, Homo Sapiens
agatagttaagtgggatcgag

SEQ ID NO: 813 - DNA, 21 bp, Homo Sapiens
gatagttaagtgggatcgaga

SEQ ID NO: 814 - DNA, 21 bp, Homo Sapiens
atagttaagtgggatcgagac

SEQ ID NO: 815 - DNA, 21 bp, Homo Sapiens
tagttaagtgggatcgagaca

SEQ ID NO: 816 - DNA, 21 bp, Homo Sapiens
gttaagtgggatcgagacatg

SEQ ID NO: 817 - DNA, 21 bp, Homo Sapiens
aagtgggatcgagacatgtaa

SEQ ID NO: 818 - DNA, 21 bp, Homo Sapiens
gtgggatcgagacatgtaagc

SEQ ID NO: 819 - DNA, 21 bp, Homo Sapiens
tgggatcgagacatgtaagca

SEQ ID NO: 820 - DNA, 21 bp, Homo Sapiens
gggatcgagacatgtaagcag

SEQ ID NO: 821 - DNA, 21 bp, Homo Sapiens
ggatcgagacatgtaagcagc

SEQ ID NO: 822 - DNA, 21 bp, Homo Sapiens
gatcgagacatgtaagcagca

SEQ ID NO: 823 - DNA, 21 bp, Homo Sapiens
atcgagacatgtaagcagcat

SEQ ID NO: 824 - DNA, 21 bp, Homo Sapiens
tcgagacatgtaagcagcatc

SEQ ID NO: 825 - DNA, 21 bp, Homo Sapiens
cgagacatgtaagcagcatca

SEQ ID NO: 826 - DNA, 21 bp, Homo Sapiens
gacatgtaagcagcatcatgg

SEQ ID NO: 827 - DNA, 21 bp, Homo Sapiens
acatgtaagcagcatcatgga

SEQ ID NO: 828 - DNA, 21 bp, Homo Sapiens
catgtaagcagcatcatggag

SEQ ID NO: 829 - DNA, 21 bp, Homo Sapiens
atgtaagcagcatcatggagg

SEQ ID NO: 830 - DNA, 21 bp, Homo Sapiens
tgtaagcagcatcatggaggt

SEQ ID NO: 831 - DNA, 21 bp, Homo Sapiens
gtaagcagcatcatggaggtt

SEQ ID NO: 832 - DNA, 21 bp, Homo Sapiens
atcatggaggtttgaagatgc

SEQ ID NO: 833 - DNA, 21 bp, Homo Sapiens
tcatggaggtttgaagatgcc

SEQ ID NO: 834 - DNA, 21 bp, Homo Sapiens
catggaggtttgaagatgccg

SEQ ID NO: 835 - DNA, 21 bp, Homo Sapiens
atggaggtttgaagatgccgc

SEQ ID NO: 836 - DNA, 21 bp, Homo Sapiens
tggaggtttgaagatgccgca

SEQ ID NO: 837 - DNA, 21 bp, Homo Sapiens
ggaggtttgaagatgccgcat

SEQ ID NO: 838 - DNA, 21 bp, Homo Sapiens
gaggtttgaagatgccgcatt

SEQ ID NO: 839 - DNA, 21 bp, Homo Sapiens
tttgaagatgccgcatttgga

SEQ ID NO: 840 - DNA, 21 bp, Homo Sapiens
ttgaagatgccgcatttggat

SEQ ID NO: 841 - DNA, 21 bp, Homo Sapiens
agatgccgcatttggattgga

SEQ ID NO: 842 - DNA, 21 bp, Homo Sapiens
gatgccgcatttggattggat

SEQ ID NO: 843 - DNA, 21 bp, Homo Sapiens
atgccgcatttggattggatg

SEQ ID NO: 844 - DNA, 21 bp, Homo Sapiens
tgccgcatttggattggatga

SEQ ID NO: 845 - DNA, 21 bp, Homo Sapiens
cgcatttggattggatgaatt

SEQ ID NO: 846 - DNA, 21 bp, Homo Sapiens
gcatttggattggatgaattc

SEQ ID NO: 847 - DNA, 21 bp, Homo Sapiens
catttggattggatgaattcc

SEQ ID NO: 848 - DNA, 21 bp, Homo Sapiens
atttggattggatgaattcca

SEQ ID NO: 849 - DNA, 21 bp, Homo Sapiens
tttggattggatgaattccaa

SEQ ID NO: 850 - DNA, 21 bp, Homo Sapiens
ttggattggatgaattccaaa

SEQ ID NO: 851 - DNA, 21 bp, Homo Sapiens
tggattggatgaattccaaat

SEQ ID NO: 852 - DNA, 21 bp, Homo Sapiens
ggattggatgaattccaaatt

SEQ ID NO: 853 - DNA, 21 bp, Homo Sapiens
gattggatgaattccaaattc

SEQ ID NO: 854 - DNA, 21 bp, Homo Sapiens
attggatgaattccaaattct

SEQ ID NO: 855 - DNA, 21 bp, Homo Sapiens
ttggatgaattccaaattctg

SEQ ID NO: 856 - DNA, 21 bp, Homo Sapiens
tggatgaattccaaattctgc

SEQ ID NO: 857 - DNA, 21 bp, Homo Sapiens
ggatgaattccaaattctgct

SEQ ID NO: 858 - DNA, 21 bp, Homo Sapiens
gatgaattccaaattctgctt

SEQ ID NO: 859 - DNA, 21 bp, Homo Sapiens
atgaattccaaattctgcttg

SEQ ID NO: 860 - DNA, 21 bp, Homo Sapiens
tgaattccaaattctgcttgc

SEQ ID NO: 861 - DNA, 21 bp, Homo Sapiens
gaattccaaattctgcttgct

SEQ ID NO: 862 - DNA, 21 bp, Homo Sapiens
aattccaaattctgcttgctt

SEQ ID NO: 863 - DNA, 21 bp, Homo Sapiens
attccaaattctgcttgcttg

SEQ ID NO: 864 - DNA, 21 bp, Homo Sapiens
ttccaaattctgcttgcttgc

SEQ ID NO: 865 - DNA, 21 bp, Homo Sapiens
tccaaattctgcttgcttgct

SEQ ID NO: 866 - DNA, 21 bp, Homo Sapiens
ccaaattctgcttgcttgctt

SEQ ID NO: 867 - DNA, 21 bp, Homo Sapiens
atatgcttatacacttacact

SEQ ID NO: 868 - DNA, 21 bp, Homo Sapiens
tatacacttacactttatgca

SEQ ID NO: 869 - DNA, 21 bp, Homo Sapiens
atacacttacactttatgcac

SEQ ID NO: 870 - DNA, 21 bp, Homo Sapiens
tacacttacactttatgcaca

SEQ ID NO: 871 - DNA, 21 bp, Homo Sapiens
acacttacactttatgcacaa

SEQ ID NO: 872 - DNA, 21 bp, Homo Sapiens
aataatgttaacatggacatg

SEQ ID NO: 873 - DNA, 21 bp, Homo Sapiens
aatgttaacatggacatgatc

SEQ ID NO: 874 - DNA, 21 bp, Homo Sapiens
aacatggacatgatcttcttt

SEQ ID NO: 875 - DNA, 21 bp, Homo Sapiens
ttataattctactttgagtgc

SEQ ID NO: 876 - DNA, 21 bp, Homo Sapiens
tataattctactttgagtgct

SEQ ID NO: 877 - DNA, 21 bp, Homo Sapiens
ataattctactttgagtgctg

SEQ ID NO: 878 - DNA, 21 bp, Homo Sapiens
taattctactttgagtgctgt

SEQ ID NO: 879 - DNA, 21 bp, Homo Sapiens
aattctactttgagtgctgtc

SEQ ID NO: 880 - DNA, 21 bp, Homo Sapiens
attctactttgagtgctgtct

SEQ ID NO: 881 - DNA, 21 bp, Homo Sapiens
ttctactttgagtgctgtctc

SEQ ID NO: 882 - DNA, 21 bp, Homo Sapiens
tctactttgagtgctgtctcc

SEQ ID NO: 883 - DNA, 21 bp, Homo Sapiens
ctactttgagtgctgtctcca

SEQ ID NO: 884 - DNA, 21 bp, Homo Sapiens
tactttgagtgctgtctccat

SEQ ID NO: 885 - DNA, 21 bp, Homo Sapiens
actttgagtgctgtctccatg

SEQ ID NO: 886 - DNA, 21 bp, Homo Sapiens
ctttgagtgctgtctccatgt

SEQ ID NO: 887 - DNA, 21 bp, Homo Sapiens
ctccatgtttgatgtatctga

SEQ ID NO: 888 - DNA, 21 bp, Homo Sapiens
tccatgtttgatgtatctgag

SEQ ID NO: 889 - DNA, 21 bp, Homo Sapiens
ccatgtttgatgtatctgagc

SEQ ID NO: 890 - DNA, 21 bp, Homo Sapiens
catgtttgatgtatctgagca

SEQ ID NO: 891 - DNA, 21 bp, Homo Sapiens
atgtttgatgtatctgagcag

SEQ ID NO: 892 - DNA, 21 bp, Homo Sapiens
tgtttgatgtatctgagcagg

SEQ ID NO: 893 - DNA, 21 bp, Homo Sapiens
gtttgatgtatctgagcaggt

SEQ ID NO: 894 - DNA, 21 bp, Homo Sapiens
tttgatgtatctgagcaggtt

SEQ ID NO: 895 - DNA, 21 bp, Homo Sapiens
ttgatgtatctgagcaggttg

SEQ ID NO: 896 - DNA, 21 bp, Homo Sapiens
tgatgtatctgagcaggttgc

SEQ ID NO: 897 - DNA, 21 bp, Homo Sapiens
gatgtatctgagcaggttgct

SEQ ID NO: 898 - DNA, 21 bp, Homo Sapiens
atgtatctgagcaggttgctc

SEQ ID NO: 899 - DNA, 21 bp, Homo Sapiens
tgtatctgagcaggttgctcc

SEQ ID NO: 900 - DNA, 21 bp, Homo Sapiens
gtatctgagcaggttgctcca

SEQ ID NO: 901 - DNA, 21 bp, Homo Sapiens
tatctgagcaggttgctccac

SEQ ID NO: 902 - DNA, 21 bp, Homo Sapiens
atctgagcaggttgctccaca

SEQ ID NO: 903 - DNA, 21 bp, Homo Sapiens
tctgagcaggttgctccacag

SEQ ID NO: 904 - DNA, 21 bp, Homo Sapiens
tgagcaggttgctccacaggt

SEQ ID NO: 905 - DNA, 21 bp, Homo Sapiens
gagcaggttgctccacaggta

SEQ ID NO: 906 - DNA, 21 bp, Homo Sapiens
agcaggttgctccacaggtag

SEQ ID NO: 907 - DNA, 21 bp, Homo Sapiens
caggttgctccacaggtagct

SEQ ID NO: 908 - DNA, 21 bp, Homo Sapiens
aggttgctccacaggtagctc

SEQ ID NO: 909 - DNA, 21 bp, Homo Sapiens
ttgctccacaggtagctctag

SEQ ID NO: 910 - DNA, 21 bp, Homo Sapiens
tgctccacaggtagctctagg

SEQ ID NO: 911 - DNA, 21 bp, Homo Sapiens
ctccacaggtagctctaggag

SEQ ID NO: 912 - DNA, 21 bp, Homo Sapiens
tccacaggtagctctaggagg

SEQ ID NO: 913 - DNA, 21 bp, Homo Sapiens
acaggtagctctaggagggct

SEQ ID NO: 914 - DNA, 21 bp, Homo Sapiens
tagctctaggagggctggcaa

SEQ ID NO: 915 - DNA, 21 bp, Homo Sapiens
ctctaggagggctggcaactt

SEQ ID NO: 916 - DNA, 21 bp, Homo Sapiens
ctaggagggctggcaacttag

SEQ ID NO: 917 - DNA, 21 bp, Homo Sapiens
aggagggctggcaacttagag

SEQ ID NO: 918 - DNA, 21 bp, Homo Sapiens
gagggctggcaacttagaggt

SEQ ID NO: 919 - DNA, 21 bp, Homo Sapiens
agggctggcaacttagaggtg

SEQ ID NO: 920 - DNA, 21 bp, Homo Sapiens
agcagagaattctcttatcca

SEQ ID NO: 921 - DNA, 21 bp, Homo Sapiens
gcagagaattctcttatccaa

SEQ ID NO: 922 - DNA, 21 bp, Homo Sapiens
cagagaattctcttatccaac

SEQ ID NO: 923 - DNA, 21 bp, Homo Sapiens
agagaattctcttatccaaca

SEQ ID NO: 924 - DNA, 21 bp, Homo Sapiens
agaattctcttatccaacatc

SEQ ID NO: 925 - DNA, 21 bp, Homo Sapiens
tatccaacatcaacatcttgg

SEQ ID NO: 926 - DNA, 21 bp, Homo Sapiens
atccaacatcaacatcttggt

SEQ ID NO: 927 - DNA, 21 bp, Homo Sapiens
tccaacatcaacatcttggtc

SEQ ID NO: 928 - DNA, 21 bp, Homo Sapiens
ccaacatcaacatcttggtca

SEQ ID NO: 929 - DNA, 21 bp, Homo Sapiens
caacatcaacatcttggtcag

SEQ ID NO: 930 - DNA, 21 bp, Homo Sapiens
atcttggtcagatttgaactc

SEQ ID NO: 931 - DNA, 21 bp, Homo Sapiens
tcttggtcagatttgaactct

SEQ ID NO: 932 - DNA, 21 bp, Homo Sapiens
ttggtcagatttgaactcttc

SEQ ID NO: 933 - DNA, 21 bp, Homo Sapiens
cagatttgaactcttcaatct

SEQ ID NO: 934 - DNA, 21 bp, Homo Sapiens
agatttgaactcttcaatctc

SEQ ID NO: 935 - DNA, 21 bp, Homo Sapiens
gatttgaactcttcaatctct

SEQ ID NO: 936 - DNA, 21 bp, Homo Sapiens
tttgaactcttcaatctcttg

SEQ ID NO: 937 - DNA, 21 bp, Homo Sapiens
ttgaactcttcaatctcttgc

SEQ ID NO: 938 - DNA, 21 bp, Homo Sapiens
tgaactcttcaatctcttgca

SEQ ID NO: 939 - DNA, 21 bp, Homo Sapiens
gaactcttcaatctcttgcac

SEQ ID NO: 940 - DNA, 21 bp, Homo Sapiens
actcttcaatctcttgcactc

SEQ ID NO: 941 - DNA, 21 bp, Homo Sapiens
ctcttcaatctcttgcactca

SEQ ID NO: 942 - DNA, 21 bp, Homo Sapiens
tcaatctcttgcactcaaagc

SEQ ID NO: 943 - DNA, 21 bp, Homo Sapiens
caatctcttgcactcaaagct

SEQ ID NO: 944 - DNA, 21 bp, Homo Sapiens
aatctcttgcactcaaagctt

SEQ ID NO: 945 - DNA, 21 bp, Homo Sapiens
atctcttgcactcaaagcttg

SEQ ID NO: 946 - DNA, 21 bp, Homo Sapiens
tctcttgcactcaaagcttgt

SEQ ID NO: 947 - DNA, 21 bp, Homo Sapiens
gcttgttaagatagttaagcg

SEQ ID NO: 948 - DNA, 21 bp, Homo Sapiens
cttgttaagatagttaagcgt

SEQ ID NO: 949 - DNA, 21 bp, Homo Sapiens
ttgttaagatagttaagcgtg

SEQ ID NO: 950 - DNA, 21 bp, Homo Sapiens
tgttaagatagttaagcgtgc

SEQ ID NO: 951 - DNA, 21 bp, Homo Sapiens
gttaagatagttaagcgtgca

SEQ ID NO: 952 - DNA, 21 bp, Homo Sapiens
ttaagatagttaagcgtgcat

SEQ ID NO: 953 - DNA, 21 bp, Homo Sapiens
gttaagcgtgcataagttaac

SEQ ID NO: 954 - DNA, 21 bp, Homo Sapiens
agcgtgcataagttaacttcc

SEQ ID NO: 955 - DNA, 21 bp, Homo Sapiens
gcgtgcataagttaacttcca

SEQ ID NO: 956 - DNA, 21 bp, Homo Sapiens
cgtgcataagttaacttccaa

SEQ ID NO: 957 - DNA, 21 bp, Homo Sapiens
acttccaatttacatactctg

SEQ ID NO: 958 - DNA, 21 bp, Homo Sapiens
cttccaatttacatactctgc

SEQ ID NO: 959 - DNA, 21 bp, Homo Sapiens
ttccaatttacatactctgct

SEQ ID NO: 960 - DNA, 21 bp, Homo Sapiens
tccaatttacatactctgctt

SEQ ID NO: 961 - DNA, 21 bp, Homo Sapiens
ttacatactctgcttagaatt

SEQ ID NO: 962 - DNA, 21 bp, Homo Sapiens
atactctgcttagaatttggg

SEQ ID NO: 963 - DNA, 21 bp, Homo Sapiens
tataattgacaggattattgg

SEQ ID NO: 964 - DNA, 21 bp, Homo Sapiens
ataattgacaggattattgga

SEQ ID NO: 965 - DNA, 21 bp, Homo Sapiens
taattgacaggattattggaa

SEQ ID NO: 966 - DNA, 21 bp, Homo Sapiens
atacatttgataaagtaaggc

SEQ ID NO: 967 - DNA, 21 bp, Homo Sapiens
tacatttgataaagtaaggca

SEQ ID NO: 968 - DNA, 21 bp, Homo Sapiens
acatttgataaagtaaggcat

SEQ ID NO: 969 - DNA, 21 bp, Homo Sapiens
catttgataaagtaaggcatg

SEQ ID NO: 970 - DNA, 21 bp, Homo Sapiens
atttgataaagtaaggcatgg

SEQ ID NO: 971 - DNA, 21 bp, Homo Sapiens
tttgataaagtaaggcatggt

SEQ ID NO: 972 - DNA, 21 bp, Homo Sapiens
ttgataaagtaaggcatggtt

SEQ ID NO: 973 - DNA, 21 bp, Homo Sapiens
tgataaagtaaggcatggttg

SEQ ID NO: 974 - DNA, 21 bp, Homo Sapiens
gataaagtaaggcatggttgt

SEQ ID NO: 975 - DNA, 21 bp, Homo Sapiens
ataaagtaaggcatggttgtg

SEQ ID NO: 976 - DNA, 21 bp, Homo Sapiens
taaagtaaggcatggttgtgg

SEQ ID NO: 977 - DNA, 21 bp, Homo Sapiens
aaagtaaggcatggttgtggt

SEQ ID NO: 978 - DNA, 21 bp, Homo Sapiens
aagtaaggcatggttgtggtt

SEQ ID NO: 979 - DNA, 21 bp, Homo Sapiens
gcatggttgtggttaatctgg

SEQ ID NO: 980 - DNA, 21 bp, Homo Sapiens
catggttgtggttaatctggt

SEQ ID NO: 981 - DNA, 21 bp, Homo Sapiens
atggttgtggttaatctggtt

SEQ ID NO: 982 - DNA, 18 bp, Homo Sapiens
attcctgaagctgacagc

SEQ ID NO: 983 - DNA, 18 bp, Homo Sapiens
ttcctgaagctgacagca

SEQ ID NO: 984 - DNA, 18 bp, Homo Sapiens
tcctgaagctgacagcat

SEQ ID NO: 985 - DNA, 18 bp, Homo Sapiens
cctgaagctgacagcatt

SEQ ID NO: 986 - DNA, 18 bp, Homo Sapiens
ctgaagctgacagcattc

SEQ ID NO: 987 - DNA, 18 bp, Homo Sapiens
tgaagctgacagcattcg

SEQ ID NO: 988 - DNA, 18 bp, Homo Sapiens
gaagctgacagcattcgg

SEQ ID NO: 989 - DNA, 18 bp, Homo Sapiens
aagctgacagcattcggg

SEQ ID NO: 990 - DNA, 18 bp, Homo Sapiens
ttagctgtgctcgcgcta

SEQ ID NO: 991 - DNA, 18 bp, Homo Sapiens
ctcgcgctactctctctt

SEQ ID NO: 992 - DNA, 18 bp, Homo Sapiens
tcgcgctactctctcttt

SEQ ID NO: 993 - DNA, 18 bp, Homo Sapiens
cgcgctactctctctttc

SEQ ID NO: 994 - DNA, 18 bp, Homo Sapiens
gcgctactctctctttct

SEQ ID NO: 995 - DNA, 18 bp, Homo Sapiens
cgctactctctctttctg

SEQ ID NO: 996 - DNA, 18 bp, Homo Sapiens
gctactctctctttctgg

SEQ ID NO: 997 - DNA, 18 bp, Homo Sapiens
ctactctctctttctggc

SEQ ID NO: 998 - DNA, 18 bp, Homo Sapiens
tactctctctttctggcc

SEQ ID NO: 999 - DNA, 18 bp, Homo Sapiens
actctctctttctggcct

SEQ ID NO: 1000 - DNA, 18 bp, Homo Sapiens
ctctctctttctggcctg

SEQ ID NO: 1001 - DNA, 18 bp, Homo Sapiens
tctctctttctggcctgg

SEQ ID NO: 1002 - DNA, 18 bp, Homo Sapiens
ctctctttctggcctgga

SEQ ID NO: 1003 - DNA, 18 bp, Homo Sapiens
tctctttctggcctggag

SEQ ID NO: 1004 - DNA, 18 bp, Homo Sapiens
tttctggcctggaggcta

SEQ ID NO: 1005 - DNA, 18 bp, Homo Sapiens
ttctggcctggaggctat

SEQ ID NO: 1006 - DNA, 18 bp, Homo Sapiens
tggaggctatccagcgta

SEQ ID NO: 1007 - DNA, 18 bp, Homo Sapiens
gaggctatccagcgtact

SEQ ID NO: 1008 - DNA, 18 bp, Homo Sapiens
aggctatccagcgtactc

SEQ ID NO: 1009 - DNA, 18 bp, Homo Sapiens
gctatccagcgtactcca

SEQ ID NO: 1010 - DNA, 18 bp, Homo Sapiens
ctatccagcgtactccaa

SEQ ID NO: 1011 - DNA, 18 bp, Homo Sapiens
tatccagcgtactccaaa

SEQ ID NO: 1012 - DNA, 18 bp, Homo Sapiens
atccagcgtactccaaag

SEQ ID NO: 1013 - DNA, 18 bp, Homo Sapiens
tccagcgtactccaaaga

SEQ ID NO: 1014 - DNA, 18 bp, Homo Sapiens
ccagcgtactccaaagat

SEQ ID NO: 1015 - DNA, 18 bp, Homo Sapiens
cagcgtactccaaagatt

SEQ ID NO: 1016 - DNA, 18 bp, Homo Sapiens
agcgtactccaaagattc

SEQ ID NO: 1017 - DNA, 18 bp, Homo Sapiens
gcgtactccaaagattca

SEQ ID NO: 1018 - DNA, 18 bp, Homo Sapiens
cgtactccaaagattcag

SEQ ID NO: 1019 - DNA, 18 bp, Homo Sapiens
gtactccaaagattcagg

SEQ ID NO: 1020 - DNA, 18 bp, Homo Sapiens
tactccaaagattcaggt

SEQ ID NO: 1021 - DNA, 18 bp, Homo Sapiens
actccaaagattcaggtt

SEQ ID NO: 1022 - DNA, 18 bp, Homo Sapiens
ctccaaagattcaggttt

SEQ ID NO: 1023 - DNA, 18 bp, Homo Sapiens
tccaaagattcaggttta

SEQ ID NO: 1024 - DNA, 18 bp, Homo Sapiens
ccaaagattcaggtttac

SEQ ID NO: 1025 - DNA, 18 bp, Homo Sapiens
caaagattcaggtttact

SEQ ID NO: 1026 - DNA, 18 bp, Homo Sapiens
aaagattcaggtttactc

SEQ ID NO: 1027 - DNA, 18 bp, Homo Sapiens
aagattcaggtttactca

SEQ ID NO: 1028 - DNA, 18 bp, Homo Sapiens
agattcaggtttactcac

SEQ ID NO: 1029 - DNA, 18 bp, Homo Sapiens
gattcaggtttactcacg

SEQ ID NO: 1030 - DNA, 18 bp, Homo Sapiens
attcaggtttactcacgt

SEQ ID NO: 1031 - DNA, 18 bp, Homo Sapiens
ttcaggtttactcacgtc

SEQ ID NO: 1032 - DNA, 18 bp, Homo Sapiens
tcaggtttactcacgtca

SEQ ID NO: 1033 - DNA, 18 bp, Homo Sapiens
caggtttactcacgtcat

SEQ ID NO: 1034 - DNA, 18 bp, Homo Sapiens
aggtttactcacgtcatc

SEQ ID NO: 1035 - DNA, 18 bp, Homo Sapiens
ggtttactcacgtcatcc

SEQ ID NO: 1036 - DNA, 18 bp, Homo Sapiens
gtttactcacgtcatcca

SEQ ID NO: 1037 - DNA, 18 bp, Homo Sapiens
tttactcacgtcatccag

SEQ ID NO: 1038 - DNA, 18 bp, Homo Sapiens
ttactcacgtcatccagc

SEQ ID NO: 1039 - DNA, 18 bp, Homo Sapiens
tactcacgtcatccagca

SEQ ID NO: 1040 - DNA, 18 bp, Homo Sapiens
actcacgtcatccagcag

SEQ ID NO: 1041 - DNA, 18 bp, Homo Sapiens
ctcacgtcatccagcaga

SEQ ID NO: 1042 - DNA, 18 bp, Homo Sapiens
tcacgtcatccagcagag

SEQ ID NO: 1043 - DNA, 18 bp, Homo Sapiens
cacgtcatccagcagaga

SEQ ID NO: 1044 - DNA, 18 bp, Homo Sapiens
acgtcatccagcagagaa

SEQ ID NO: 1045 - DNA, 18 bp, Homo Sapiens
cgtcatccagcagagaat

SEQ ID NO: 1046 - DNA, 18 bp, Homo Sapiens
gtcatccagcagagaatg

SEQ ID NO: 1047 - DNA, 18 bp, Homo Sapiens
tcatccagcagagaatgg

SEQ ID NO: 1048 - DNA, 18 bp, Homo Sapiens
catccagcagagaatgga

SEQ ID NO: 1049 - DNA, 18 bp, Homo Sapiens
atccagcagagaatggaa

SEQ ID NO: 1050 - DNA, 18 bp, Homo Sapiens
tccagcagagaatggaaa

SEQ ID NO: 1051 - DNA, 18 bp, Homo Sapiens
ccagcagagaatggaaag

SEQ ID NO: 1052 - DNA, 18 bp, Homo Sapiens
cagcagagaatggaaagt

SEQ ID NO: 1053 - DNA, 18 bp, Homo Sapiens
agcagagaatggaaagtc

SEQ ID NO: 1054 - DNA, 18 bp, Homo Sapiens
gcagagaatggaaagtca

SEQ ID NO: 1055 - DNA, 18 bp, Homo Sapiens
cagagaatggaaagtcaa

SEQ ID NO: 1056 - DNA, 18 bp, Homo Sapiens
agagaatggaaagtcaaa

SEQ ID NO: 1057 - DNA, 18 bp, Homo Sapiens
gagaatggaaagtcaaat

SEQ ID NO: 1058 - DNA, 18 bp, Homo Sapiens
agaatggaaagtcaaatt

SEQ ID NO: 1059 - DNA, 18 bp, Homo Sapiens
gaatggaaagtcaaattt

SEQ ID NO: 1060 - DNA, 18 bp, Homo Sapiens
aatggaaagtcaaatttc

SEQ ID NO: 1061 - DNA, 18 bp, Homo Sapiens
atggaaagtcaaatttcc

SEQ ID NO: 1062 - DNA, 18 bp, Homo Sapiens
tggaaagtcaaatttcct

SEQ ID NO: 1063 - DNA, 18 bp, Homo Sapiens
ggaaagtcaaatttcctg

SEQ ID NO: 1064 - DNA, 18 bp, Homo Sapiens
gaaagtcaaatttcctga

SEQ ID NO: 1065 - DNA, 18 bp, Homo Sapiens
aaagtcaaatttcctgaa

SEQ ID NO: 1066 - DNA, 18 bp, Homo Sapiens
aagtcaaatttcctgaat

SEQ ID NO: 1067 - DNA, 18 bp, Homo Sapiens
agtcaaatttcctgaatt

SEQ ID NO: 1068 - DNA, 18 bp, Homo Sapiens
gtcaaatttcctgaattg

SEQ ID NO: 1069 - DNA, 18 bp, Homo Sapiens
tcaaatttcctgaattgc

SEQ ID NO: 1070 - DNA, 18 bp, Homo Sapiens
caaatttcctgaattgct

SEQ ID NO: 1071 - DNA, 18 bp, Homo Sapiens
aaatttcctgaattgcta

SEQ ID NO: 1072 - DNA, 18 bp, Homo Sapiens
aatttcctgaattgctat

SEQ ID NO: 1073 - DNA, 18 bp, Homo Sapiens
atttcctgaattgctatg

SEQ ID NO: 1074 - DNA, 18 bp, Homo Sapiens
tttcctgaattgctatgt

SEQ ID NO: 1075 - DNA, 18 bp, Homo Sapiens
ttcctgaattgctatgtg

SEQ ID NO: 1076 - DNA, 18 bp, Homo Sapiens
tcctgaattgctatgtgt

SEQ ID NO: 1077 - DNA, 18 bp, Homo Sapiens
cctgaattgctatgtgtc

SEQ ID NO: 1078 - DNA, 18 bp, Homo Sapiens
ctgaattgctatgtgtct

SEQ ID NO: 1079 - DNA, 18 bp, Homo Sapiens
tgaattgctatgtgtctg

SEQ ID NO: 1080 - DNA, 18 bp, Homo Sapiens
gaattgctatgtgtctgg

SEQ ID NO: 1081 - DNA, 18 bp, Homo Sapiens
aattgctatgtgtctggg

SEQ ID NO: 1082 - DNA, 18 bp, Homo Sapiens
attgctatgtgtctgggt

SEQ ID NO: 1083 - DNA, 18 bp, Homo Sapiens
ttgctatgtgtctgggtt

SEQ ID NO: 1084 - DNA, 18 bp, Homo Sapiens
tgctatgtgtctgggttt

SEQ ID NO: 1085 - DNA, 18 bp, Homo Sapiens
gctatgtgtctgggtttc

SEQ ID NO: 1086 - DNA, 18 bp, Homo Sapiens
ctatgtgtctgggtttca

SEQ ID NO: 1087 - DNA, 18 bp, Homo Sapiens
tatgtgtctgggtttcat

SEQ ID NO: 1088 - DNA, 18 bp, Homo Sapiens
atgtgtctgggtttcatc

SEQ ID NO: 1089 - DNA, 18 bp, Homo Sapiens
tgtgtctgggtttcatcc

SEQ ID NO: 1090 - DNA, 18 bp, Homo Sapiens
gtgtctgggtttcatcca

SEQ ID NO: 1091 - DNA, 18 bp, Homo Sapiens
tgtctgggtttcatccat

SEQ ID NO: 1092 - DNA, 18 bp, Homo Sapiens
gtctgggtttcatccatc

SEQ ID NO: 1093 - DNA, 18 bp, Homo Sapiens
tctgggtttcatccatcc

SEQ ID NO: 1094 - DNA, 18 bp, Homo Sapiens
ctgggtttcatccatccg

SEQ ID NO: 1095 - DNA, 18 bp, Homo Sapiens
tgggtttcatccatccga

SEQ ID NO: 1096 - DNA, 18 bp, Homo Sapiens
gggtttcatccatccgac

SEQ ID NO: 1097 - DNA, 18 bp, Homo Sapiens
ggtttcatccatccgaca

SEQ ID NO: 1098 - DNA, 18 bp, Homo Sapiens
gtttcatccatccgacat

SEQ ID NO: 1099 - DNA, 18 bp, Homo Sapiens
tttcatccatccgacatt

SEQ ID NO: 1100 - DNA, 18 bp, Homo Sapiens
ttcatccatccgacattg

SEQ ID NO: 1101 - DNA, 18 bp, Homo Sapiens
tcatccatccgacattga

SEQ ID NO: 1102 - DNA, 18 bp, Homo Sapiens
catccatccgacattgaa

SEQ ID NO: 1103 - DNA, 18 bp, Homo Sapiens
atccatccgacattgaag

SEQ ID NO: 1104 - DNA, 18 bp, Homo Sapiens
tccatccgacattgaagt

SEQ ID NO: 1105 - DNA, 18 bp, Homo Sapiens
ccatccgacattgaagtt

SEQ ID NO: 1106 - DNA, 18 bp, Homo Sapiens
catccgacattgaagttg

SEQ ID NO: 1107 - DNA, 18 bp, Homo Sapiens
atccgacattgaagttga

SEQ ID NO: 1108 - DNA, 18 bp, Homo Sapiens
tccgacattgaagttgac

SEQ ID NO: 1109 - DNA, 18 bp, Homo Sapiens
ccgacattgaagttgact

SEQ ID NO: 1110 - DNA, 18 bp, Homo Sapiens
cgacattgaagttgactt

SEQ ID NO: 1111 - DNA, 18 bp, Homo Sapiens
gacattgaagttgactta

SEQ ID NO: 1112 - DNA, 18 bp, Homo Sapiens
acattgaagttgacttac

SEQ ID NO: 1113 - DNA, 18 bp, Homo Sapiens
cattgaagttgacttact

SEQ ID NO: 1114 - DNA, 18 bp, Homo Sapiens
attgaagttgacttactg

SEQ ID NO: 1115 - DNA, 18 bp, Homo Sapiens
ttgaagttgacttactga

SEQ ID NO: 1116 - DNA, 18 bp, Homo Sapiens
tgaagttgacttactgaa

SEQ ID NO: 1117 - DNA, 18 bp, Homo Sapiens
gaagttgacttactgaag

SEQ ID NO: 1118 - DNA, 18 bp, Homo Sapiens
aagttgacttactgaaga

SEQ ID NO: 1119 - DNA, 18 bp, Homo Sapiens
agttgacttactgaagaa

SEQ ID NO: 1120 - DNA, 18 bp, Homo Sapiens
gttgacttactgaagaat

SEQ ID NO: 1121 - DNA, 18 bp, Homo Sapiens
ttgacttactgaagaatg

SEQ ID NO: 1122 - DNA, 18 bp, Homo Sapiens
tgacttactgaagaatgg

SEQ ID NO: 1123 - DNA, 18 bp, Homo Sapiens
gacttactgaagaatgga

SEQ ID NO: 1124 - DNA, 18 bp, Homo Sapiens
acttactgaagaatggag

SEQ ID NO: 1125 - DNA, 18 bp, Homo Sapiens
cttactgaagaatggaga

SEQ ID NO: 1126 - DNA, 18 bp, Homo Sapiens
ttactgaagaatggagag

SEQ ID NO: 1127 - DNA, 18 bp, Homo Sapiens
tactgaagaatggagaga

SEQ ID NO: 1128 - DNA, 18 bp, Homo Sapiens
actgaagaatggagagag

SEQ ID NO: 1129 - DNA, 18 bp, Homo Sapiens
ctgaagaatggagagaga

SEQ ID NO: 1130 - DNA, 18 bp, Homo Sapiens
tgaagaatggagagagaa

SEQ ID NO: 1131 - DNA, 18 bp, Homo Sapiens
gaagaatggagagagaat

SEQ ID NO: 1132 - DNA, 18 bp, Homo Sapiens
aagaatggagagagaatt

SEQ ID NO: 1133 - DNA, 18 bp, Homo Sapiens
agaatggagagagaattg

SEQ ID NO: 1134 - DNA, 18 bp, Homo Sapiens
gaatggagagagaattga

SEQ ID NO: 1135 - DNA, 18 bp, Homo Sapiens
aatggagagagaattgaa

SEQ ID NO: 1136 - DNA, 18 bp, Homo Sapiens
atggagagagaattgaaa

SEQ ID NO: 1137 - DNA, 18 bp, Homo Sapiens
aaagtggagcattcagac

SEQ ID NO: 1138 - DNA, 18 bp, Homo Sapiens
aagtggagcattcagact

SEQ ID NO: 1139 - DNA, 18 bp, Homo Sapiens
agtggagcattcagactt

SEQ ID NO: 1140 - DNA, 18 bp, Homo Sapiens
gtggagcattcagacttg

SEQ ID NO: 1141 - DNA, 18 bp, Homo Sapiens
tggagcattcagacttgt

SEQ ID NO: 1142 - DNA, 18 bp, Homo Sapiens
ggagcattcagacttgtc

SEQ ID NO: 1143 - DNA, 18 bp, Homo Sapiens
gagcattcagacttgtct

SEQ ID NO: 1144 - DNA, 18 bp, Homo Sapiens
agcattcagacttgtctt

SEQ ID NO: 1145 - DNA, 18 bp, Homo Sapiens
gcattcagacttgtcttt

SEQ ID NO: 1146 - DNA, 18 bp, Homo Sapiens
cattcagacttgtctttc

SEQ ID NO: 1147 - DNA, 18 bp, Homo Sapiens
attcagacttgtctttca

SEQ ID NO: 1148 - DNA, 18 bp, Homo Sapiens
ttcagacttgtctttcag

SEQ ID NO: 1149 - DNA, 18 bp, Homo Sapiens
tcagacttgtctttcagc

SEQ ID NO: 1150 - DNA, 18 bp, Homo Sapiens
cagacttgtctttcagca

SEQ ID NO: 1151 - DNA, 18 bp, Homo Sapiens
agacttgtctttcagcaa

SEQ ID NO: 1152 - DNA, 18 bp, Homo Sapiens
gacttgtctttcagcaag

SEQ ID NO: 1153 - DNA, 18 bp, Homo Sapiens
acttgtctttcagcaagg

SEQ ID NO: 1154 - DNA, 18 bp, Homo Sapiens
cttgtctttcagcaagga

SEQ ID NO: 1155 - DNA, 18 bp, Homo Sapiens
ttgtctttcagcaaggac

SEQ ID NO: 1156 - DNA, 18 bp, Homo Sapiens
tgtctttcagcaaggact

SEQ ID NO: 1157 - DNA, 18 bp, Homo Sapiens
gtctttcagcaaggactg

SEQ ID NO: 1158 - DNA, 18 bp, Homo Sapiens
tctttcagcaaggactgg

SEQ ID NO: 1159 - DNA, 18 bp, Homo Sapiens
ctttcagcaaggactggt

SEQ ID NO: 1160 - DNA, 18 bp, Homo Sapiens
tttcagcaaggactggtc

SEQ ID NO: 1161 - DNA, 18 bp, Homo Sapiens
ttcagcaaggactggtct

SEQ ID NO: 1162 - DNA, 18 bp, Homo Sapiens
tcagcaaggactggtctt

SEQ ID NO: 1163 - DNA, 18 bp, Homo Sapiens
cagcaaggactggtcttt

SEQ ID NO: 1164 - DNA, 18 bp, Homo Sapiens
agcaaggactggtctttc

SEQ ID NO: 1165 - DNA, 18 bp, Homo Sapiens
gcaaggactggtctttct

SEQ ID NO: 1166 - DNA, 18 bp, Homo Sapiens
caaggactggtctttcta

SEQ ID NO: 1167 - DNA, 18 bp, Homo Sapiens
aaggactggtctttctat

SEQ ID NO: 1168 - DNA, 18 bp, Homo Sapiens
aggactggtctttctatc

SEQ ID NO: 1169 - DNA, 18 bp, Homo Sapiens
ggactggtctttctatct

SEQ ID NO: 1170 - DNA, 18 bp, Homo Sapiens
gactggtctttctatctc

SEQ ID NO: 1171 - DNA, 18 bp, Homo Sapiens
actggtctttctatctct

SEQ ID NO: 1172 - DNA, 18 bp, Homo Sapiens
ctggtctttctatctctt

SEQ ID NO: 1173 - DNA, 18 bp, Homo Sapiens
tggtctttctatctcttg

SEQ ID NO: 1174 - DNA, 18 bp, Homo Sapiens
ggtctttctatctcttgt

SEQ ID NO: 1175 - DNA, 18 bp, Homo Sapiens
gtctttctatctcttgta

SEQ ID NO: 1176 - DNA, 18 bp, Homo Sapiens
tctttctatctcttgtac

SEQ ID NO: 1177 - DNA, 18 bp, Homo Sapiens
ctttctatctcttgtact

SEQ ID NO: 1178 - DNA, 18 bp, Homo Sapiens
tttctatctcttgtacta

SEQ ID NO: 1179 - DNA, 18 bp, Homo Sapiens
ttctatctcttgtactac

SEQ ID NO: 1180 - DNA, 18 bp, Homo Sapiens
tctatctcttgtactaca

SEQ ID NO: 1181 - DNA, 18 bp, Homo Sapiens
ctatctcttgtactacac

SEQ ID NO: 1182 - DNA, 18 bp, Homo Sapiens
tatctcttgtactacact

SEQ ID NO: 1183 - DNA, 18 bp, Homo Sapiens
atctcttgtactacactg

SEQ ID NO: 1184 - DNA, 18 bp, Homo Sapiens
tctcttgtactacactga

SEQ ID NO: 1185 - DNA, 18 bp, Homo Sapiens
ctcttgtactacactgaa

SEQ ID NO: 1186 - DNA, 18 bp, Homo Sapiens
tcttgtactacactgaat

SEQ ID NO: 1187 - DNA, 18 bp, Homo Sapiens
cttgtactacactgaatt

SEQ ID NO: 1188 - DNA, 18 bp, Homo Sapiens
ttgtactacactgaattc

SEQ ID NO: 1189 - DNA, 18 bp, Homo Sapiens
tgtactacactgaattca

SEQ ID NO: 1190 - DNA, 18 bp, Homo Sapiens
gtactacactgaattcac

SEQ ID NO: 1191 - DNA, 18 bp, Homo Sapiens
tactacactgaattcacc

SEQ ID NO: 1192 - DNA, 18 bp, Homo Sapiens
actacactgaattcaccc

SEQ ID NO: 1193 - DNA, 18 bp, Homo Sapiens
aaagatgagtatgcctgc

SEQ ID NO: 1194 - DNA, 18 bp, Homo Sapiens
aagatgagtatgcctgcc

SEQ ID NO: 1195 - DNA, 18 bp, Homo Sapiens
agatgagtatgcctgccg

SEQ ID NO: 1196 - DNA, 18 bp, Homo Sapiens
gatgagtatgcctgccgt

SEQ ID NO: 1197 - DNA, 18 bp, Homo Sapiens
atgagtatgcctgccgtg

SEQ ID NO: 1198 - DNA, 18 bp, Homo Sapiens
tgagtatgcctgccgtgt

SEQ ID NO: 1199 - DNA, 18 bp, Homo Sapiens
agtatgcctgccgtgtga

SEQ ID NO: 1200 - DNA, 18 bp, Homo Sapiens
gtatgcctgccgtgtgaa

SEQ ID NO: 1201 - DNA, 18 bp, Homo Sapiens
tatgcctgccgtgtgaac

SEQ ID NO: 1202 - DNA, 18 bp, Homo Sapiens
ctgccgtgtgaaccatgt

SEQ ID NO: 1203 - DNA, 18 bp, Homo Sapiens
tgccgtgtgaaccatgtg

SEQ ID NO: 1204 - DNA, 18 bp, Homo Sapiens
gccgtgtgaaccatgtga

SEQ ID NO: 1205 - DNA, 18 bp, Homo Sapiens
ccgtgtgaaccatgtgac

SEQ ID NO: 1206 - DNA, 18 bp, Homo Sapiens
cgtgtgaaccatgtgact

SEQ ID NO: 1207 - DNA, 18 bp, Homo Sapiens
gtgtgaaccatgtgactt

SEQ ID NO: 1208 - DNA, 18 bp, Homo Sapiens
tgtgaaccatgtgacttt

SEQ ID NO: 1209 - DNA, 18 bp, Homo Sapiens
gtgaaccatgtgactttg

SEQ ID NO: 1210 - DNA, 18 bp, Homo Sapiens
tgaaccatgtgactttgt

SEQ ID NO: 1211 - DNA, 18 bp, Homo Sapiens
gaaccatgtgactttgtc

SEQ ID NO: 1212 - DNA, 18 bp, Homo Sapiens
aaccatgtgactttgtca

SEQ ID NO: 1213 - DNA, 18 bp, Homo Sapiens
accatgtgactttgtcac

SEQ ID NO: 1214 - DNA, 18 bp, Homo Sapiens
ccatgtgactttgtcaca

SEQ ID NO: 1215 - DNA, 18 bp, Homo Sapiens
catgtgactttgtcacag

SEQ ID NO: 1216 - DNA, 18 bp, Homo Sapiens
atgtgactttgtcacagc

SEQ ID NO: 1217 - DNA, 18 bp, Homo Sapiens
tgtgactttgtcacagcc

SEQ ID NO: 1218 - DNA, 18 bp, Homo Sapiens
gtgactttgtcacagccc

SEQ ID NO: 1219 - DNA, 18 bp, Homo Sapiens
tgactttgtcacagccca

SEQ ID NO: 1220 - DNA, 18 bp, Homo Sapiens
gactttgtcacagcccaa

SEQ ID NO: 1221 - DNA, 18 bp, Homo Sapiens
actttgtcacagcccaag

SEQ ID NO: 1222 - DNA, 18 bp, Homo Sapiens
ctttgtcacagcccaaga

SEQ ID NO: 1223 - DNA, 18 bp, Homo Sapiens
tttgtcacagcccaagat

SEQ ID NO: 1224 - DNA, 18 bp, Homo Sapiens
ttgtcacagcccaagata

SEQ ID NO: 1225 - DNA, 18 bp, Homo Sapiens
tgtcacagcccaagatag

SEQ ID NO: 1226 - DNA, 18 bp, Homo Sapiens
gtcacagcccaagatagt

SEQ ID NO: 1227 - DNA, 18 bp, Homo Sapiens
tcacagcccaagatagtt

SEQ ID NO: 1228 - DNA, 18 bp, Homo Sapiens
cacagcccaagatagtta

SEQ ID NO: 1229 - DNA, 18 bp, Homo Sapiens
acagcccaagatagttaa

SEQ ID NO: 1230 - DNA, 18 bp, Homo Sapiens
cagcccaagatagttaag

SEQ ID NO: 1231 - DNA, 18 bp, Homo Sapiens
agcccaagatagttaagt

SEQ ID NO: 1232 - DNA, 18 bp, Homo Sapiens
gcccaagatagttaagtg

SEQ ID NO: 1233 - DNA, 18 bp, Homo Sapiens
cccaagatagttaagtgg

SEQ ID NO: 1234 - DNA, 18 bp, Homo Sapiens
ccaagatagttaagtggg

SEQ ID NO: 1235 - DNA, 18 bp, Homo Sapiens
caagatagttaagtggga

SEQ ID NO: 1236 - DNA, 18 bp, Homo Sapiens
aagatagttaagtgggat

SEQ ID NO: 1237 - DNA, 18 bp, Homo Sapiens
agatagttaagtgggatc

SEQ ID NO: 1238 - DNA, 18 bp, Homo Sapiens
gatagttaagtgggatcg

SEQ ID NO: 1239 - DNA, 18 bp, Homo Sapiens
atagttaagtgggatcga

SEQ ID NO: 1240 - DNA, 18 bp, Homo Sapiens
tagttaagtgggatcgag

SEQ ID NO: 1241 - DNA, 18 bp, Homo Sapiens
agttaagtgggatcgaga

SEQ ID NO: 1242 - DNA, 18 bp, Homo Sapiens
gttaagtgggatcgagac

SEQ ID NO: 1243 - DNA, 18 bp, Homo Sapiens
ttaagtgggatcgagaca

SEQ ID NO: 1244 - DNA, 18 bp, Homo Sapiens
taagtgggatcgagacat

SEQ ID NO: 1245 - DNA, 18 bp, Homo Sapiens
aagtgggatcgagacatg

SEQ ID NO: 1246 - DNA, 18 bp, Homo Sapiens
agtgggatcgagacatgt

SEQ ID NO: 1247 - DNA, 18 bp, Homo Sapiens
gtgggatcgagacatgta

SEQ ID NO: 1248 - DNA, 18 bp, Homo Sapiens
tgggatcgagacatgtaa

SEQ ID NO: 1249 - DNA, 18 bp, Homo Sapiens
gggatcgagacatgtaag

SEQ ID NO: 1250 - DNA, 18 bp, Homo Sapiens
ggatcgagacatgtaagc

SEQ ID NO: 1251 - DNA, 18 bp, Homo Sapiens
gatcgagacatgtaagca

SEQ ID NO: 1252 - DNA, 18 bp, Homo Sapiens
atcgagacatgtaagcag

SEQ ID NO: 1253 - DNA, 18 bp, Homo Sapiens
tcgagacatgtaagcagc

SEQ ID NO: 1254 - DNA, 18 bp, Homo Sapiens
cgagacatgtaagcagca

SEQ ID NO: 1255 - DNA, 18 bp, Homo Sapiens
gagacatgtaagcagcat

SEQ ID NO: 1256 - DNA, 18 bp, Homo Sapiens
agacatgtaagcagcatc

SEQ ID NO: 1257 - DNA, 18 bp, Homo Sapiens
gacatgtaagcagcatca

SEQ ID NO: 1258 - DNA, 18 bp, Homo Sapiens
acatgtaagcagcatcat

SEQ ID NO: 1259 - DNA, 18 bp, Homo Sapiens
catgtaagcagcatcatg

SEQ ID NO: 1260 - DNA, 18 bp, Homo Sapiens
atgtaagcagcatcatgg

SEQ ID NO: 1261 - DNA, 18 bp, Homo Sapiens
tgtaagcagcatcatgga

SEQ ID NO: 1262 - DNA, 18 bp, Homo Sapiens
gtaagcagcatcatggag

SEQ ID NO: 1263 - DNA, 18 bp, Homo Sapiens
taagcagcatcatggagg

SEQ ID NO: 1264 - DNA, 18 bp, Homo Sapiens
aagcagcatcatggaggt

SEQ ID NO: 1265 - DNA, 18 bp, Homo Sapiens
agcagcatcatggaggtt

SEQ ID NO: 1266 - DNA, 18 bp, Homo Sapiens
gcagcatcatggaggttt

SEQ ID NO: 1267 - DNA, 18 bp, Homo Sapiens
cagcatcatggaggtttg

SEQ ID NO: 1268 - DNA, 18 bp, Homo Sapiens
agcatcatggaggtttga

SEQ ID NO: 1269 - DNA, 18 bp, Homo Sapiens
gcatcatggaggtttgaa

SEQ ID NO: 1270 - DNA, 18 bp, Homo Sapiens
catcatggaggtttgaag

SEQ ID NO: 1271 - DNA, 18 bp, Homo Sapiens
atcatggaggtttgaaga

SEQ ID NO: 1272 - DNA, 18 bp, Homo Sapiens
tcatggaggtttgaagat

SEQ ID NO: 1273 - DNA, 18 bp, Homo Sapiens
catggaggtttgaagatg

SEQ ID NO: 1274 - DNA, 18 bp, Homo Sapiens
atggaggtttgaagatgc

SEQ ID NO: 1275 - DNA, 18 bp, Homo Sapiens
tggaggtttgaagatgcc

SEQ ID NO: 1276 - DNA, 18 bp, Homo Sapiens
ggaggtttgaagatgccg

SEQ ID NO: 1277 - DNA, 18 bp, Homo Sapiens
gaggtttgaagatgccgc

SEQ ID NO: 1278 - DNA, 18 bp, Homo Sapiens
aggtttgaagatgccgca

SEQ ID NO: 1279 - DNA, 18 bp, Homo Sapiens
ggtttgaagatgccgcat

SEQ ID NO: 1280 - DNA, 18 bp, Homo Sapiens
gtttgaagatgccgcatt

SEQ ID NO: 1281 - DNA, 18 bp, Homo Sapiens
tttgaagatgccgcattt

SEQ ID NO: 1282 - DNA, 18 bp, Homo Sapiens
ttgaagatgccgcatttg

SEQ ID NO: 1283 - DNA, 18 bp, Homo Sapiens
tgaagatgccgcatttgg

SEQ ID NO: 1284 - DNA, 18 bp, Homo Sapiens
gaagatgccgcatttgga

SEQ ID NO: 1285 - DNA, 18 bp, Homo Sapiens
aagatgccgcatttggat

SEQ ID NO: 1286 - DNA, 18 bp, Homo Sapiens
agatgccgcatttggatt

SEQ ID NO: 1287 - DNA, 18 bp, Homo Sapiens
gatgccgcatttggattg

SEQ ID NO: 1288 - DNA, 18 bp, Homo Sapiens
atgccgcatttggattgg

SEQ ID NO: 1289 - DNA, 18 bp, Homo Sapiens
tgccgcatttggattgga

SEQ ID NO: 1290 - DNA, 18 bp, Homo Sapiens
gccgcatttggattggat

SEQ ID NO: 1291 - DNA, 18 bp, Homo Sapiens
ccgcatttggattggatg

SEQ ID NO: 1292 - DNA, 18 bp, Homo Sapiens
cgcatttggattggatga

SEQ ID NO: 1293 - DNA, 18 bp, Homo Sapiens
gcatttggattggatgaa

SEQ ID NO: 1294 - DNA, 18 bp, Homo Sapiens
catttggattggatgaat

SEQ ID NO: 1295 - DNA, 18 bp, Homo Sapiens
atttggattggatgaatt

SEQ ID NO: 1296 - DNA, 18 bp, Homo Sapiens
tttggattggatgaattc

SEQ ID NO: 1297 - DNA, 18 bp, Homo Sapiens
ttggattggatgaattcc

SEQ ID NO: 1298 - DNA, 18 bp, Homo Sapiens
tggattggatgaattcca

SEQ ID NO: 1299 - DNA, 18 bp, Homo Sapiens
ggattggatgaattccaa

SEQ ID NO: 1300 - DNA, 18 bp, Homo Sapiens
gattggatgaattccaaa

SEQ ID NO: 1301 - DNA, 18 bp, Homo Sapiens
attggatgaattccaaat

SEQ ID NO: 1302 - DNA, 18 bp, Homo Sapiens
ttggatgaattccaaatt

SEQ ID NO: 1303 - DNA, 18 bp, Homo Sapiens
tggatgaattccaaattc

SEQ ID NO: 1304 - DNA, 18 bp, Homo Sapiens
ggatgaattccaaattct

SEQ ID NO: 1305 - DNA, 18 bp, Homo Sapiens
gatgaattccaaattctg

SEQ ID NO: 1306 - DNA, 18 bp, Homo Sapiens
atgaattccaaattctgc

SEQ ID NO: 1307 - DNA, 18 bp, Homo Sapiens
tgaattccaaattctgct

SEQ ID NO: 1308 - DNA, 18 bp, Homo Sapiens
gaattccaaattctgctt

SEQ ID NO: 1309 - DNA, 18 bp, Homo Sapiens
aattccaaattctgcttg

SEQ ID NO: 1310 - DNA, 18 bp, Homo Sapiens
attccaaattctgcttgc

SEQ ID NO: 1311 - DNA, 18 bp, Homo Sapiens
ttccaaattctgcttgct

SEQ ID NO: 1312 - DNA, 18 bp, Homo Sapiens
tccaaattctgcttgctt

SEQ ID NO: 1313 - DNA, 18 bp, Homo Sapiens
ccaaattctgcttgcttg

SEQ ID NO: 1314 - DNA, 18 bp, Homo Sapiens
caaattctgcttgcttgc

SEQ ID NO: 1315 - DNA, 18 bp, Homo Sapiens
aaattctgcttgcttgct

SEQ ID NO: 1316 - DNA, 18 bp, Homo Sapiens
aattctgcttgcttgctt

SEQ ID NO: 1317 - DNA, 18 bp, Homo Sapiens
attctgcttgcttgcttt

SEQ ID NO: 1318 - DNA, 18 bp, Homo Sapiens
attgatatgcttatacac

SEQ ID NO: 1319 - DNA, 18 bp, Homo Sapiens
ttgatatgcttatacact

SEQ ID NO: 1320 - DNA, 18 bp, Homo Sapiens
tgatatgcttatacactt

SEQ ID NO: 1321 - DNA, 18 bp, Homo Sapiens
gatatgcttatacactta

SEQ ID NO: 1322 - DNA, 18 bp, Homo Sapiens
atatgcttatacacttac

SEQ ID NO: 1323 - DNA, 18 bp, Homo Sapiens
tatgcttatacacttaca

SEQ ID NO: 1324 - DNA, 18 bp, Homo Sapiens
atgcttatacacttacac

SEQ ID NO: 1325 - DNA, 18 bp, Homo Sapiens
tgcttatacacttacact

SEQ ID NO: 1326 - DNA, 18 bp, Homo Sapiens
gcttatacacttacactt

SEQ ID NO: 1327 - DNA, 18 bp, Homo Sapiens
cttatacacttacacttt

SEQ ID NO: 1328 - DNA, 18 bp, Homo Sapiens
atacacttacactttatg

SEQ ID NO: 1329 - DNA, 18 bp, Homo Sapiens
tacacttacactttatgc

SEQ ID NO: 1330 - DNA, 18 bp, Homo Sapiens
acacttacactttatgca

SEQ ID NO: 1331 - DNA, 18 bp, Homo Sapiens
cacttacactttatgcac

SEQ ID NO: 1332 - DNA, 18 bp, Homo Sapiens
acttacactttatgcaca

SEQ ID NO: 1333 - DNA, 18 bp, Homo Sapiens
cttacactttatgcacaa

SEQ ID NO: 1334 - DNA, 18 bp, Homo Sapiens
ttacactttatgcacaaa

SEQ ID NO: 1335 - DNA, 18 bp, Homo Sapiens
tgtagggttataataatg

SEQ ID NO: 1336 - DNA, 18 bp, Homo Sapiens
gtagggttataataatgt

SEQ ID NO: 1337 - DNA, 18 bp, Homo Sapiens
aataatgttaacatggac

SEQ ID NO: 1338 - DNA, 18 bp, Homo Sapiens
ataatgttaacatggaca

SEQ ID NO: 1339 - DNA, 18 bp, Homo Sapiens
taatgttaacatggacat

SEQ ID NO: 1340 - DNA, 18 bp, Homo Sapiens
aatgttaacatggacatg

SEQ ID NO: 1341 - DNA, 18 bp, Homo Sapiens
atgttaacatggacatga

SEQ ID NO: 1342 - DNA, 18 bp, Homo Sapiens
tgttaacatggacatgat

SEQ ID NO: 1343 - DNA, 18 bp, Homo Sapiens
gttaacatggacatgatc

SEQ ID NO: 1344 - DNA, 18 bp, Homo Sapiens
ttaacatggacatgatct

SEQ ID NO: 1345 - DNA, 18 bp, Homo Sapiens
taacatggacatgatctt

SEQ ID NO: 1346 - DNA, 18 bp, Homo Sapiens
aacatggacatgatcttc

SEQ ID NO: 1347 - DNA, 18 bp, Homo Sapiens
acatggacatgatcttct

SEQ ID NO: 1348 - DNA, 18 bp, Homo Sapiens
catggacatgatcttctt

SEQ ID NO: 1349 - DNA, 18 bp, Homo Sapiens
atggacatgatcttcttt

SEQ ID NO: 1350 - DNA, 18 bp, Homo Sapiens
tggacatgatcttcttta

SEQ ID NO: 1351 - DNA, 18 bp, Homo Sapiens
ggacatgatcttctttat

SEQ ID NO: 1352 - DNA, 18 bp, Homo Sapiens
gacatgatcttctttata

SEQ ID NO: 1353 - DNA, 18 bp, Homo Sapiens
ataattctactttgagtg

SEQ ID NO: 1354 - DNA, 18 bp, Homo Sapiens
taattctactttgagtgc

SEQ ID NO: 1355 - DNA, 18 bp, Homo Sapiens
aattctactttgagtgct

SEQ ID NO: 1356 - DNA, 18 bp, Homo Sapiens
attctactttgagtgctg

SEQ ID NO: 1357 - DNA, 18 bp, Homo Sapiens
ttctactttgagtgctgt

SEQ ID NO: 1358 - DNA, 18 bp, Homo Sapiens
tctactttgagtgctgtc

SEQ ID NO: 1359 - DNA, 18 bp, Homo Sapiens
ctactttgagtgctgtct

SEQ ID NO: 1360 - DNA, 18 bp, Homo Sapiens
tactttgagtgctgtctc

SEQ ID NO: 1361 - DNA, 18 bp, Homo Sapiens
actttgagtgctgtctcc

SEQ ID NO: 1362 - DNA, 18 bp, Homo Sapiens
ctttgagtgctgtctcca

SEQ ID NO: 1363 - DNA, 18 bp, Homo Sapiens
tttgagtgctgtctccat

SEQ ID NO: 1364 - DNA, 18 bp, Homo Sapiens
ttgagtgctgtctccatg

SEQ ID NO: 1365 - DNA, 18 bp, Homo Sapiens
tgagtgctgtctccatgt

SEQ ID NO: 1366 - DNA, 18 bp, Homo Sapiens
gagtgctgtctccatgtt

SEQ ID NO: 1367 - DNA, 18 bp, Homo Sapiens
agtgctgtctccatgttt

SEQ ID NO: 1368 - DNA, 18 bp, Homo Sapiens
gtgctgtctccatgtttg

SEQ ID NO: 1369 - DNA, 18 bp, Homo Sapiens
tgctgtctccatgtttga

SEQ ID NO: 1370 - DNA, 18 bp, Homo Sapiens
gctgtctccatgtttgat

SEQ ID NO: 1371 - DNA, 18 bp, Homo Sapiens
ctgtctccatgtttgatg

SEQ ID NO: 1372 - DNA, 18 bp, Homo Sapiens
tgtctccatgtttgatgt

SEQ ID NO: 1373 - DNA, 18 bp, Homo Sapiens
gtctccatgtttgatgta

SEQ ID NO: 1374 - DNA, 18 bp, Homo Sapiens
tctccatgtttgatgtat

SEQ ID NO: 1375 - DNA, 18 bp, Homo Sapiens
ctccatgtttgatgtatc

SEQ ID NO: 1376 - DNA, 18 bp, Homo Sapiens
tccatgtttgatgtatct

SEQ ID NO: 1377 - DNA, 18 bp, Homo Sapiens
ccatgtttgatgtatctg

SEQ ID NO: 1378 - DNA, 18 bp, Homo Sapiens
catgtttgatgtatctga

SEQ ID NO: 1379 - DNA, 18 bp, Homo Sapiens
atgtttgatgtatctgag

SEQ ID NO: 1380 - DNA, 18 bp, Homo Sapiens
tgtttgatgtatctgagc

SEQ ID NO: 1381 - DNA, 18 bp, Homo Sapiens
gtttgatgtatctgagca

SEQ ID NO: 1382 - DNA, 18 bp, Homo Sapiens
tttgatgtatctgagcag

SEQ ID NO: 1383 - DNA, 18 bp, Homo Sapiens
ttgatgtatctgagcagg

SEQ ID NO: 1384 - DNA, 18 bp, Homo Sapiens
tgatgtatctgagcaggt

SEQ ID NO: 1385 - DNA, 18 bp, Homo Sapiens
gatgtatctgagcaggtt

SEQ ID NO: 1386 - DNA, 18 bp, Homo Sapiens
atgtatctgagcaggttg

SEQ ID NO: 1387 - DNA, 18 bp, Homo Sapiens
tgtatctgagcaggttgc

SEQ ID NO: 1388 - DNA, 18 bp, Homo Sapiens
gtatctgagcaggttgct

SEQ ID NO: 1389 - DNA, 18 bp, Homo Sapiens
tatctgagcaggttgctc

SEQ ID NO: 1390 - DNA, 18 bp, Homo Sapiens
atctgagcaggttgctcc

SEQ ID NO: 1391 - DNA, 18 bp, Homo Sapiens
tctgagcaggttgctcca

SEQ ID NO: 1392 - DNA, 18 bp, Homo Sapiens
tgagcaggttgctccaca

SEQ ID NO: 1393 - DNA, 18 bp, Homo Sapiens
caggttgctccacaggta

SEQ ID NO: 1394 - DNA, 18 bp, Homo Sapiens
aggttgctccacaggtag

SEQ ID NO: 1395 - DNA, 18 bp, Homo Sapiens
gttgctccacaggtagct

SEQ ID NO: 1396 - DNA, 18 bp, Homo Sapiens
ttgctccacaggtagctc

SEQ ID NO: 1397 - DNA, 18 bp, Homo Sapiens
tgctccacaggtagctct

SEQ ID NO: 1398 - DNA, 18 bp, Homo Sapiens
gctccacaggtagctcta

SEQ ID NO: 1399 - DNA, 18 bp, Homo Sapiens
ctccacaggtagctctag

SEQ ID NO: 1400 - DNA, 18 bp, Homo Sapiens
tccacaggtagctctagg

SEQ ID NO: 1401 - DNA, 18 bp, Homo Sapiens
ccacaggtagctctagga

SEQ ID NO: 1402 - DNA, 18 bp, Homo Sapiens
cacaggtagctctaggag

SEQ ID NO: 1403 - DNA, 18 bp, Homo Sapiens
acaggtagctctaggagg

SEQ ID NO: 1404 - DNA, 18 bp, Homo Sapiens
taggagggctggcaactt

SEQ ID NO: 1405 - DNA, 18 bp, Homo Sapiens
aggagggctggcaactta

SEQ ID NO: 1406 - DNA, 18 bp, Homo Sapiens
gagggctggcaacttaga

SEQ ID NO: 1407 - DNA, 18 bp, Homo Sapiens
agggctggcaacttagag

SEQ ID NO: 1408 - DNA, 18 bp, Homo Sapiens
ggctggcaacttagaggt

SEQ ID NO: 1409 - DNA, 18 bp, Homo Sapiens
gctggcaacttagaggtg

SEQ ID NO: 1410 - DNA, 18 bp, Homo Sapiens
ctggcaacttagaggtgg

SEQ ID NO: 1411 - DNA, 18 bp, Homo Sapiens
tggcaacttagaggtggg

SEQ ID NO: 1412 - DNA, 18 bp, Homo Sapiens
gggagcagagaattctct

SEQ ID NO: 1413 - DNA, 18 bp, Homo Sapiens
ggagcagagaattctctt

SEQ ID NO: 1414 - DNA, 18 bp, Homo Sapiens
gagcagagaattctctta

SEQ ID NO: 1415 - DNA, 18 bp, Homo Sapiens
agcagagaattctcttat

SEQ ID NO: 1416 - DNA, 18 bp, Homo Sapiens
gcagagaattctcttatc

SEQ ID NO: 1417 - DNA, 18 bp, Homo Sapiens
cagagaattctcttatcc

SEQ ID NO: 1418 - DNA, 18 bp, Homo Sapiens
agagaattctcttatcca

SEQ ID NO: 1419 - DNA, 18 bp, Homo Sapiens
gagaattctcttatccaa

SEQ ID NO: 1420 - DNA, 18 bp, Homo Sapiens
agaattctcttatccaac

SEQ ID NO: 1421 - DNA, 18 bp, Homo Sapiens
gaattctcttatccaaca

SEQ ID NO: 1422 - DNA, 18 bp, Homo Sapiens
aattctcttatccaacat

SEQ ID NO: 1423 - DNA, 18 bp, Homo Sapiens
attctcttatccaacatc

SEQ ID NO: 1424 - DNA, 18 bp, Homo Sapiens
ttctcttatccaacatca

SEQ ID NO: 1425 - DNA, 18 bp, Homo Sapiens
tctcttatccaacatcaa

SEQ ID NO: 1426 - DNA, 18 bp, Homo Sapiens
ctcttatccaacatcaac

SEQ ID NO: 1427 - DNA, 18 bp, Homo Sapiens
tcttatccaacatcaaca

SEQ ID NO: 1428 - DNA, 18 bp, Homo Sapiens
cttatccaacatcaacat

SEQ ID NO: 1429 - DNA, 18 bp, Homo Sapiens
ttatccaacatcaacatc

SEQ ID NO: 1430 - DNA, 18 bp, Homo Sapiens
tatccaacatcaacatct

SEQ ID NO: 1431 - DNA, 18 bp, Homo Sapiens
atccaacatcaacatctt

SEQ ID NO: 1432 - DNA, 18 bp, Homo Sapiens
tccaacatcaacatcttg

SEQ ID NO: 1433 - DNA, 18 bp, Homo Sapiens
ccaacatcaacatcttgg

SEQ ID NO: 1434 - DNA, 18 bp, Homo Sapiens
caacatcaacatcttggt

SEQ ID NO: 1435 - DNA, 18 bp, Homo Sapiens
aacatcaacatcttggtc

SEQ ID NO: 1436 - DNA, 18 bp, Homo Sapiens
acatcaacatcttggtca

SEQ ID NO: 1437 - DNA, 18 bp, Homo Sapiens
catcaacatcttggtcag

SEQ ID NO: 1438 - DNA, 18 bp, Homo Sapiens
atcaacatcttggtcaga

SEQ ID NO: 1439 - DNA, 18 bp, Homo Sapiens
tcaacatcttggtcagat

SEQ ID NO: 1440 - DNA, 18 bp, Homo Sapiens
caacatcttggtcagatt

SEQ ID NO: 1441 - DNA, 18 bp, Homo Sapiens
aacatcttggtcagattt

SEQ ID NO: 1442 - DNA, 18 bp, Homo Sapiens
acatcttggtcagatttg

SEQ ID NO: 1443 - DNA, 18 bp, Homo Sapiens
catcttggtcagatttga

SEQ ID NO: 1444 - DNA, 18 bp, Homo Sapiens
atcttggtcagatttgaa

SEQ ID NO: 1445 - DNA, 18 bp, Homo Sapiens
tcttggtcagatttgaac

SEQ ID NO: 1446 - DNA, 18 bp, Homo Sapiens
cttggtcagatttgaact

SEQ ID NO: 1447 - DNA, 18 bp, Homo Sapiens
ttggtcagatttgaactc

SEQ ID NO: 1448 - DNA, 18 bp, Homo Sapiens
tggtcagatttgaactct

SEQ ID NO: 1449 - DNA, 18 bp, Homo Sapiens
ggtcagatttgaactctt

SEQ ID NO: 1450 - DNA, 18 bp, Homo Sapiens
gtcagatttgaactcttc

SEQ ID NO: 1451 - DNA, 18 bp, Homo Sapiens
tcagatttgaactcttca

SEQ ID NO: 1452 - DNA, 18 bp, Homo Sapiens
cagatttgaactcttcaa

SEQ ID NO: 1453 - DNA, 18 bp, Homo Sapiens
agatttgaactcttcaat

SEQ ID NO: 1454 - DNA, 18 bp, Homo Sapiens
gatttgaactcttcaatc

SEQ ID NO: 1455 - DNA, 18 bp, Homo Sapiens
atttgaactcttcaatct

SEQ ID NO: 1456 - DNA, 18 bp, Homo Sapiens
tttgaactcttcaatctc

SEQ ID NO: 1457 - DNA, 18 bp, Homo Sapiens
ttgaactcttcaatctct

SEQ ID NO: 1458 - DNA, 18 bp, Homo Sapiens
tgaactcttcaatctctt

SEQ ID NO: 1459 - DNA, 18 bp, Homo Sapiens
gaactcttcaatctcttg

SEQ ID NO: 1460 - DNA, 18 bp, Homo Sapiens
aactcttcaatctcttgc

SEQ ID NO: 1461 - DNA, 18 bp, Homo Sapiens
actcttcaatctcttgca

SEQ ID NO: 1462 - DNA, 18 bp, Homo Sapiens
ctcttcaatctcttgcac

SEQ ID NO: 1463 - DNA, 18 bp, Homo Sapiens
tcttcaatctcttgcact

SEQ ID NO: 1464 - DNA, 18 bp, Homo Sapiens
cttcaatctcttgcactc

SEQ ID NO: 1465 - DNA, 18 bp, Homo Sapiens
ttcaatctcttgcactca

SEQ ID NO: 1466 - DNA, 18 bp, Homo Sapiens
tcaatctcttgcactcaa

SEQ ID NO: 1467 - DNA, 18 bp, Homo Sapiens
caatctcttgcactcaaa

SEQ ID NO: 1468 - DNA, 18 bp, Homo Sapiens
aatctcttgcactcaaag

SEQ ID NO: 1469 - DNA, 18 bp, Homo Sapiens
atctcttgcactcaaagc

SEQ ID NO: 1470 - DNA, 18 bp, Homo Sapiens
tctcttgcactcaaagct

SEQ ID NO: 1471 - DNA, 18 bp, Homo Sapiens
ctcttgcactcaaagctt

SEQ ID NO: 1472 - DNA, 18 bp, Homo Sapiens
tcttgcactcaaagcttg

SEQ ID NO: 1473 - DNA, 18 bp, Homo Sapiens
cttgcactcaaagcttgt

SEQ ID NO: 1474 - DNA, 18 bp, Homo Sapiens
ttgcactcaaagcttgtt

SEQ ID NO: 1475 - DNA, 18 bp, Homo Sapiens
tgcactcaaagcttgtta

SEQ ID NO: 1476 - DNA, 18 bp, Homo Sapiens
gcactcaaagcttgttaa

SEQ ID NO: 1477 - DNA, 18 bp, Homo Sapiens
cactcaaagcttgttaag

SEQ ID NO: 1478 - DNA, 18 bp, Homo Sapiens
actcaaagcttgttaaga

SEQ ID NO: 1479 - DNA, 18 bp, Homo Sapiens
ctcaaagcttgttaagat

SEQ ID NO: 1480 - DNA, 18 bp, Homo Sapiens
tcaaagcttgttaagata

SEQ ID NO: 1481 - DNA, 18 bp, Homo Sapiens
caaagcttgttaagatag

SEQ ID NO: 1482 - DNA, 18 bp, Homo Sapiens
aaagcttgttaagatagt

SEQ ID NO: 1483 - DNA, 18 bp, Homo Sapiens
aagcttgttaagatagtt

SEQ ID NO: 1484 - DNA, 18 bp, Homo Sapiens
agcttgttaagatagtta

SEQ ID NO: 1485 - DNA, 18 bp, Homo Sapiens
gcttgttaagatagttaa

SEQ ID NO: 1486 - DNA, 18 bp, Homo Sapiens
cttgttaagatagttaag

SEQ ID NO: 1487 - DNA, 18 bp, Homo Sapiens
ttgttaagatagttaagc

SEQ ID NO: 1488 - DNA, 18 bp, Homo Sapiens
tgttaagatagttaagcg

SEQ ID NO: 1489 - DNA, 18 bp, Homo Sapiens
gttaagatagttaagcgt

SEQ ID NO: 1490 - DNA, 18 bp, Homo Sapiens
ttaagatagttaagcgtg

SEQ ID NO: 1491 - DNA, 18 bp, Homo Sapiens
taagatagttaagcgtgc

SEQ ID NO: 1492 - DNA, 18 bp, Homo Sapiens
aagatagttaagcgtgca

SEQ ID NO: 1493 - DNA, 18 bp, Homo Sapiens
agatagttaagcgtgcat

SEQ ID NO: 1494 - DNA, 18 bp, Homo Sapiens
gatagttaagcgtgcata

SEQ ID NO: 1495 - DNA, 18 bp, Homo Sapiens
atagttaagcgtgcataa

SEQ ID NO: 1496 - DNA, 18 bp, Homo Sapiens
tagttaagcgtgcataag

SEQ ID NO: 1497 - DNA, 18 bp, Homo Sapiens
agttaagcgtgcataagt

SEQ ID NO: 1498 - DNA, 18 bp, Homo Sapiens
gttaagcgtgcataagtt

SEQ ID NO: 1499 - DNA, 18 bp, Homo Sapiens
ttaagcgtgcataagtta

SEQ ID NO: 1500 - DNA, 18 bp, Homo Sapiens
taagcgtgcataagttaa

SEQ ID NO: 1501 - DNA, 18 bp, Homo Sapiens
aagcgtgcataagttaac

SEQ ID NO: 1502 - DNA, 18 bp, Homo Sapiens
agcgtgcataagttaact

SEQ ID NO: 1503 - DNA, 18 bp, Homo Sapiens
gcgtgcataagttaactt

SEQ ID NO: 1504 - DNA, 18 bp, Homo Sapiens
cgtgcataagttaacttc

SEQ ID NO: 1505 - DNA, 18 bp, Homo Sapiens
gtgcataagttaacttcc

SEQ ID NO: 1506 - DNA, 18 bp, Homo Sapiens
tgcataagttaacttcca

SEQ ID NO: 1507 - DNA, 18 bp, Homo Sapiens
gcataagttaacttccaa

SEQ ID NO: 1508 - DNA, 18 bp, Homo Sapiens
cataagttaacttccaat

SEQ ID NO: 1509 - DNA, 18 bp, Homo Sapiens
agttaacttccaatttac

SEQ ID NO: 1510 - DNA, 18 bp, Homo Sapiens
gttaacttccaatttaca

SEQ ID NO: 1511 - DNA, 18 bp, Homo Sapiens
aacttccaatttacatac

SEQ ID NO: 1512 - DNA, 18 bp, Homo Sapiens
acttccaatttacatact

SEQ ID NO: 1513 - DNA, 18 bp, Homo Sapiens
cttccaatttacatactc

SEQ ID NO: 1514 - DNA, 18 bp, Homo Sapiens
ttccaatttacatactct

SEQ ID NO: 1515 - DNA, 18 bp, Homo Sapiens
tccaatttacatactctg

SEQ ID NO: 1516 - DNA, 18 bp, Homo Sapiens
ccaatttacatactctgc

SEQ ID NO: 1517 - DNA, 18 bp, Homo Sapiens
caatttacatactctgct

SEQ ID NO: 1518 - DNA, 18 bp, Homo Sapiens
aatttacatactctgctt

SEQ ID NO: 1519 - DNA, 18 bp, Homo Sapiens
atttacatactctgctta

SEQ ID NO: 1520 - DNA, 18 bp, Homo Sapiens
tttacatactctgcttag

SEQ ID NO: 1521 - DNA, 18 bp, Homo Sapiens
ttacatactctgcttaga

SEQ ID NO: 1522 - DNA, 18 bp, Homo Sapiens
tacatactctgcttagaa

SEQ ID NO: 1523 - DNA, 18 bp, Homo Sapiens
acatactctgcttagaat

SEQ ID NO: 1524 - DNA, 18 bp, Homo Sapiens
catactctgcttagaatt

SEQ ID NO: 1525 - DNA, 18 bp, Homo Sapiens
atactctgcttagaattt

SEQ ID NO: 1526 - DNA, 18 bp, Homo Sapiens
tactctgcttagaatttg

SEQ ID NO: 1527 - DNA, 18 bp, Homo Sapiens
actctgcttagaatttgg

SEQ ID NO: 1528 - DNA, 18 bp, Homo Sapiens
ctctgcttagaatttggg

SEQ ID NO: 1529 - DNA, 18 bp, Homo Sapiens
agaaatataattgacagg

SEQ ID NO: 1530 - DNA, 18 bp, Homo Sapiens
gaaatataattgacagga

SEQ ID NO: 1531 - DNA, 18 bp, Homo Sapiens
taattgacaggattattg

SEQ ID NO: 1532 - DNA, 18 bp, Homo Sapiens
aattgacaggattattgg

SEQ ID NO: 1533 - DNA, 18 bp, Homo Sapiens
attgacaggattattgga

SEQ ID NO: 1534 - DNA, 18 bp, Homo Sapiens
ttgacaggattattggaa

SEQ ID NO: 1535 - DNA, 18 bp, Homo Sapiens
tgacaggattattggaaa

SEQ ID NO: 1536 - DNA, 18 bp, Homo Sapiens
gacaggattattggaaat

SEQ ID NO: 1537 - DNA, 18 bp, Homo Sapiens
acaggattattggaaatt

SEQ ID NO: 1538 - DNA, 18 bp, Homo Sapiens
caggattattggaaattt

SEQ ID NO: 1539 - DNA, 18 bp, Homo Sapiens
aggattattggaaatttg

SEQ ID NO: 1540 - DNA, 18 bp, Homo Sapiens
ggattattggaaatttgt

SEQ ID NO: 1541 - DNA, 18 bp, Homo Sapiens
acatttgataaagtaagg

SEQ ID NO: 1542 - DNA, 18 bp, Homo Sapiens
catttgataaagtaaggc

SEQ ID NO: 1543 - DNA, 18 bp, Homo Sapiens
atttgataaagtaaggca

SEQ ID NO: 1544 - DNA, 18 bp, Homo Sapiens
tttgataaagtaaggcat

SEQ ID NO: 1545 - DNA, 18 bp, Homo Sapiens
ttgataaagtaaggcatg

SEQ ID NO: 1546 - DNA, 18 bp, Homo Sapiens
tgataaagtaaggcatgg

SEQ ID NO: 1547 - DNA, 18 bp, Homo Sapiens
gataaagtaaggcatggt

SEQ ID NO: 1548 - DNA, 18 bp, Homo Sapiens
ataaagtaaggcatggtt

SEQ ID NO: 1549 - DNA, 18 bp, Homo Sapiens
taaagtaaggcatggttg

SEQ ID NO: 1550 - DNA, 18 bp, Homo Sapiens
aaagtaaggcatggttgt

SEQ ID NO: 1551 - DNA, 18 bp, Homo Sapiens
aagtaaggcatggttgtg

SEQ ID NO: 1552 - DNA, 18 bp, Homo Sapiens
agtaaggcatggttgtgg

SEQ ID NO: 1553 - DNA, 18 bp, Homo Sapiens
gtaaggcatggttgtggt

SEQ ID NO: 1554 - DNA, 18 bp, Homo Sapiens
taaggcatggttgtggtt

SEQ ID NO: 1555 - DNA, 18 bp, Homo Sapiens
aaggcatggttgtggtta

SEQ ID NO: 1556 - DNA, 18 bp, Homo Sapiens
aggcatggttgtggttaa

SEQ ID NO: 1557 - DNA, 18 bp, Homo Sapiens
ggcatggttgtggttaat

SEQ ID NO: 1558 - DNA, 18 bp, Homo Sapiens
gcatggttgtggttaatc

SEQ ID NO: 1559 - DNA, 18 bp, Homo Sapiens
catggttgtggttaatct

SEQ ID NO: 1560 - DNA, 18 bp, Homo Sapiens
atggttgtggttaatctg

SEQ ID NO: 1561 - DNA, 18 bp, Homo Sapiens
tggttgtggttaatctgg

SEQ ID NO: 1562 - DNA, 18 bp, Homo Sapiens
ggttgtggttaatctggt

SEQ ID NO: 1563 - DNA, 18 bp, Homo Sapiens
gttgtggttaatctggtt

SEQ ID NO: 1564 - DNA, 18 bp, Homo Sapiens
ttgtggttaatctggttt

SEQ ID NO: 1565 - DNA, 18 bp, Homo Sapiens
tgtggttaatctggttta

SEQ ID NO: 1566 - DNA, 18 bp, Homo Sapiens
gtggttaatctggtttat

SEQ ID NO: 1567 - DNA, 18 bp, Homo Sapiens
tggttaatctggtttatt

SEQ ID NO: 1568 - DNA, 18 bp, Homo Sapiens
ggttaatctggtttattt

SEQ ID NO: 1569 - DNA, 18 bp, Homo Sapiens
tttgttccacaagttaaa

SEQ ID NO: 1570 - DNA, 18 bp, Homo Sapiens
ttgttccacaagttaaat

SEQ ID NO: 1571 - DNA, 18 bp, Homo Sapiens
tgttccacaagttaaata

SEQ ID NO: 1572 - DNA, 18 bp, Homo Sapiens
gttccacaagttaaataa

SEQ ID NO: 1573 - DNA, 18 bp, Homo Sapiens
ccacaagttaaataaatc

SEQ ID NO: 1574 - DNA, 19 bp, Homo Sapiens
attcctgaagctgacagca

SEQ ID NO: 1575 - DNA, 19 bp, Homo Sapiens
ttcctgaagctgacagcat

SEQ ID NO: 1576 - DNA, 19 bp, Homo Sapiens
tcctgaagctgacagcatt

SEQ ID NO: 1577 - DNA, 19 bp, Homo Sapiens
cctgaagctgacagcattc

SEQ ID NO: 1578 - DNA, 19 bp, Homo Sapiens
ctgaagctgacagcattcg

SEQ ID NO: 1579 - DNA, 19 bp, Homo Sapiens
tgaagctgacagcattcgg

SEQ ID NO: 1580 - DNA, 19 bp, Homo Sapiens
gaagctgacagcattcggg

SEQ ID NO: 1581 - DNA, 19 bp, Homo Sapiens
aagctgacagcattcgggc

SEQ ID NO: 1582 - DNA, 19 bp, Homo Sapiens
cttagctgtgctcgcgcta

SEQ ID NO: 1583 - DNA, 19 bp, Homo Sapiens
ttagctgtgctcgcgctac

SEQ ID NO: 1584 - DNA, 19 bp, Homo Sapiens
tagctgtgctcgcgctact

SEQ ID NO: 1585 - DNA, 19 bp, Homo Sapiens
tgtgctcgcgctactctct

SEQ ID NO: 1586 - DNA, 19 bp, Homo Sapiens
tgctcgcgctactctctct

SEQ ID NO: 1587 - DNA, 19 bp, Homo Sapiens
gctcgcgctactctctctt

SEQ ID NO: 1588 - DNA, 19 bp, Homo Sapiens
ctcgcgctactctctcttt

SEQ ID NO: 1589 - DNA, 19 bp, Homo Sapiens
tcgcgctactctctctttc

SEQ ID NO: 1590 - DNA, 19 bp, Homo Sapiens
cgcgctactctctctttct

SEQ ID NO: 1591 - DNA, 19 bp, Homo Sapiens
gcgctactctctctttctg

SEQ ID NO: 1592 - DNA, 19 bp, Homo Sapiens
cgctactctctctttctgg

SEQ ID NO: 1593 - DNA, 19 bp, Homo Sapiens
gctactctctctttctggc

SEQ ID NO: 1594 - DNA, 19 bp, Homo Sapiens
ctactctctctttctggcc

SEQ ID NO: 1595 - DNA, 19 bp, Homo Sapiens
tactctctctttctggcct

SEQ ID NO: 1596 - DNA, 19 bp, Homo Sapiens
actctctctttctggcctg

SEQ ID NO: 1597 - DNA, 19 bp, Homo Sapiens
ctctctctttctggcctgg

SEQ ID NO: 1598 - DNA, 19 bp, Homo Sapiens
tctctctttctggcctgga

SEQ ID NO: 1599 - DNA, 19 bp, Homo Sapiens
ctctctttctggcctggag

SEQ ID NO: 1600 - DNA, 19 bp, Homo Sapiens
tctctttctggcctggagg

SEQ ID NO: 1601 - DNA, 19 bp, Homo Sapiens
tctttctggcctggaggct

SEQ ID NO: 1602 - DNA, 19 bp, Homo Sapiens
ctttctggcctggaggcta

SEQ ID NO: 1603 - DNA, 19 bp, Homo Sapiens
tttctggcctggaggctat

SEQ ID NO: 1604 - DNA, 19 bp, Homo Sapiens
ttctggcctggaggctatc

SEQ ID NO: 1605 - DNA, 19 bp, Homo Sapiens
ctggaggctatccagcgta

SEQ ID NO: 1606 - DNA, 19 bp, Homo Sapiens
tggaggctatccagcgtac

SEQ ID NO: 1607 - DNA, 19 bp, Homo Sapiens
ggaggctatccagcgtact

SEQ ID NO: 1608 - DNA, 19 bp, Homo Sapiens
gaggctatccagcgtactc

SEQ ID NO: 1609 - DNA, 19 bp, Homo Sapiens
aggctatccagcgtactcc

SEQ ID NO: 1610 - DNA, 19 bp, Homo Sapiens
ggctatccagcgtactcca

SEQ ID NO: 1611 - DNA, 19 bp, Homo Sapiens
gctatccagcgtactccaa

SEQ ID NO: 1612 - DNA, 19 bp, Homo Sapiens
ctatccagcgtactccaaa

SEQ ID NO: 1613 - DNA, 19 bp, Homo Sapiens
tatccagcgtactccaaag

SEQ ID NO: 1614 - DNA, 19 bp, Homo Sapiens
atccagcgtactccaaaga

SEQ ID NO: 1615 - DNA, 19 bp, Homo Sapiens
tccagcgtactccaaagat

SEQ ID NO: 1616 - DNA, 19 bp, Homo Sapiens
ccagcgtactccaaagatt

SEQ ID NO: 1617 - DNA, 19 bp, Homo Sapiens
cagcgtactccaaagattc

SEQ ID NO: 1618 - DNA, 19 bp, Homo Sapiens
agcgtactccaaagattca

SEQ ID NO: 1619 - DNA, 19 bp, Homo Sapiens
gcgtactccaaagattcag

SEQ ID NO: 1620 - DNA, 19 bp, Homo Sapiens
cgtactccaaagattcagg

SEQ ID NO: 1621 - DNA, 19 bp, Homo Sapiens
gtactccaaagattcaggt

SEQ ID NO: 1622 - DNA, 19 bp, Homo Sapiens
tactccaaagattcaggtt

SEQ ID NO: 1623 - DNA, 19 bp, Homo Sapiens
actccaaagattcaggttt

SEQ ID NO: 1624 - DNA, 19 bp, Homo Sapiens
ctccaaagattcaggttta

SEQ ID NO: 1625 - DNA, 19 bp, Homo Sapiens
tccaaagattcaggtttac

SEQ ID NO: 1626 - DNA, 19 bp, Homo Sapiens
ccaaagattcaggtttact

SEQ ID NO: 1627 - DNA, 19 bp, Homo Sapiens
caaagattcaggtttactc

SEQ ID NO: 1628 - DNA, 19 bp, Homo Sapiens
aaagattcaggtttactca

SEQ ID NO: 1629 - DNA, 19 bp, Homo Sapiens
aagattcaggtttactcac

SEQ ID NO: 1630 - DNA, 19 bp, Homo Sapiens
agattcaggtttactcacg

SEQ ID NO: 1631 - DNA, 19 bp, Homo Sapiens
gattcaggtttactcacgt

SEQ ID NO: 1632 - DNA, 19 bp, Homo Sapiens
attcaggtttactcacgtc

SEQ ID NO: 1633 - DNA, 19 bp, Homo Sapiens
ttcaggtttactcacgtca

SEQ ID NO: 1634 - DNA, 19 bp, Homo Sapiens
tcaggtttactcacgtcat

SEQ ID NO: 1635 - DNA, 19 bp, Homo Sapiens
caggtttactcacgtcatc

SEQ ID NO: 1636 - DNA, 19 bp, Homo Sapiens
aggtttactcacgtcatcc

SEQ ID NO: 1637 - DNA, 19 bp, Homo Sapiens
ggtttactcacgtcatcca

SEQ ID NO: 1638 - DNA, 19 bp, Homo Sapiens
gtttactcacgtcatccag

SEQ ID NO: 1639 - DNA, 19 bp, Homo Sapiens
tttactcacgtcatccagc

SEQ ID NO: 1640 - DNA, 19 bp, Homo Sapiens
ttactcacgtcatccagca

SEQ ID NO: 1641 - DNA, 19 bp, Homo Sapiens
tactcacgtcatccagcag

SEQ ID NO: 1642 - DNA, 19 bp, Homo Sapiens
actcacgtcatccagcaga

SEQ ID NO: 1643 - DNA, 19 bp, Homo Sapiens
ctcacgtcatccagcagag

SEQ ID NO: 1644 - DNA, 19 bp, Homo Sapiens
tcacgtcatccagcagaga

SEQ ID NO: 1645 - DNA, 19 bp, Homo Sapiens
cacgtcatccagcagagaa

SEQ ID NO: 1646 - DNA, 19 bp, Homo Sapiens
acgtcatccagcagagaat

SEQ ID NO: 1647 - DNA, 19 bp, Homo Sapiens
cgtcatccagcagagaatg

SEQ ID NO: 1648 - DNA, 19 bp, Homo Sapiens
gtcatccagcagagaatgg

SEQ ID NO: 1649 - DNA, 19 bp, Homo Sapiens
tcatccagcagagaatgga

SEQ ID NO: 1650 - DNA, 19 bp, Homo Sapiens
catccagcagagaatggaa

SEQ ID NO: 1651 - DNA, 19 bp, Homo Sapiens
atccagcagagaatggaaa

SEQ ID NO: 1652 - DNA, 19 bp, Homo Sapiens
tccagcagagaatggaaag

SEQ ID NO: 1653 - DNA, 19 bp, Homo Sapiens
ccagcagagaatggaaagt

SEQ ID NO: 1654 - DNA, 19 bp, Homo Sapiens
cagcagagaatggaaagtc

SEQ ID NO: 1655 - DNA, 19 bp, Homo Sapiens
agcagagaatggaaagtca

SEQ ID NO: 1656 - DNA, 19 bp, Homo Sapiens
gcagagaatggaaagtcaa

SEQ ID NO: 1657 - DNA, 19 bp, Homo Sapiens
cagagaatggaaagtcaaa

SEQ ID NO: 1658 - DNA, 19 bp, Homo Sapiens
agagaatggaaagtcaaat

SEQ ID NO: 1659 - DNA, 19 bp, Homo Sapiens
gagaatggaaagtcaaatt

SEQ ID NO: 1660 - DNA, 19 bp, Homo Sapiens
agaatggaaagtcaaattt

SEQ ID NO: 1661 - DNA, 19 bp, Homo Sapiens
gaatggaaagtcaaatttc

SEQ ID NO: 1662 - DNA, 19 bp, Homo Sapiens
aatggaaagtcaaatttcc

SEQ ID NO: 1663 - DNA, 19 bp, Homo Sapiens
atggaaagtcaaatttcct

SEQ ID NO: 1664 - DNA, 19 bp, Homo Sapiens
tggaaagtcaaatttcctg

SEQ ID NO: 1665 - DNA, 19 bp, Homo Sapiens
ggaaagtcaaatttcctga

SEQ ID NO: 1666 - DNA, 19 bp, Homo Sapiens
gaaagtcaaatttcctgaa

SEQ ID NO: 1667 - DNA, 19 bp, Homo Sapiens
aaagtcaaatttcctgaat

SEQ ID NO: 1668 - DNA, 19 bp, Homo Sapiens
aagtcaaatttcctgaatt

SEQ ID NO: 1669 - DNA, 19 bp, Homo Sapiens
agtcaaatttcctgaattg

SEQ ID NO: 1670 - DNA, 19 bp, Homo Sapiens
gtcaaatttcctgaattgc

SEQ ID NO: 1671 - DNA, 19 bp, Homo Sapiens
tcaaatttcctgaattgct

SEQ ID NO: 1672 - DNA, 19 bp, Homo Sapiens
caaatttcctgaattgcta

SEQ ID NO: 1673 - DNA, 19 bp, Homo Sapiens
aaatttcctgaattgctat

SEQ ID NO: 1674 - DNA, 19 bp, Homo Sapiens
aatttcctgaattgctatg

SEQ ID NO: 1675 - DNA, 19 bp, Homo Sapiens
atttcctgaattgctatgt

SEQ ID NO: 1676 - DNA, 19 bp, Homo Sapiens
tttcctgaattgctatgtg

SEQ ID NO: 1677 - DNA, 19 bp, Homo Sapiens
ttcctgaattgctatgtgt

SEQ ID NO: 1678 - DNA, 19 bp, Homo Sapiens
tcctgaattgctatgtgtc

SEQ ID NO: 1679 - DNA, 19 bp, Homo Sapiens
cctgaattgctatgtgtct

SEQ ID NO: 1680 - DNA, 19 bp, Homo Sapiens
ctgaattgctatgtgtctg

SEQ ID NO: 1681 - DNA, 19 bp, Homo Sapiens
tgaattgctatgtgtctgg

SEQ ID NO: 1682 - DNA, 19 bp, Homo Sapiens
gaattgctatgtgtctggg

SEQ ID NO: 1683 - DNA, 19 bp, Homo Sapiens
aattgctatgtgtctgggt

SEQ ID NO: 1684 - DNA, 19 bp, Homo Sapiens
attgctatgtgtctgggtt

SEQ ID NO: 1685 - DNA, 19 bp, Homo Sapiens
ttgctatgtgtctgggttt

SEQ ID NO: 1686 - DNA, 19 bp, Homo Sapiens
tgctatgtgtctgggtttc

SEQ ID NO: 1687 - DNA, 19 bp, Homo Sapiens
gctatgtgtctgggtttca

SEQ ID NO: 1688 - DNA, 19 bp, Homo Sapiens
ctatgtgtctgggtttcat

SEQ ID NO: 1689 - DNA, 19 bp, Homo Sapiens
tatgtgtctgggtttcatc

SEQ ID NO: 1690 - DNA, 19 bp, Homo Sapiens
atgtgtctgggtttcatcc

SEQ ID NO: 1691 - DNA, 19 bp, Homo Sapiens
tgtgtctgggtttcatcca

SEQ ID NO: 1692 - DNA, 19 bp, Homo Sapiens
gtgtctgggtttcatccat

SEQ ID NO: 1693 - DNA, 19 bp, Homo Sapiens
tgtctgggtttcatccatc

SEQ ID NO: 1694 - DNA, 19 bp, Homo Sapiens
gtctgggtttcatccatcc

SEQ ID NO: 1695 - DNA, 19 bp, Homo Sapiens
tctgggtttcatccatccg

SEQ ID NO: 1696 - DNA, 19 bp, Homo Sapiens
ctgggtttcatccatccga

SEQ ID NO: 1697 - DNA, 19 bp, Homo Sapiens
tgggtttcatccatccgac

SEQ ID NO: 1698 - DNA, 19 bp, Homo Sapiens
gggtttcatccatccgaca

SEQ ID NO: 1699 - DNA, 19 bp, Homo Sapiens
ggtttcatccatccgacat

SEQ ID NO: 1700 - DNA, 19 bp, Homo Sapiens
gtttcatccatccgacatt

SEQ ID NO: 1701 - DNA, 19 bp, Homo Sapiens
tttcatccatccgacattg

SEQ ID NO: 1702 - DNA, 19 bp, Homo Sapiens
ttcatccatccgacattga

SEQ ID NO: 1703 - DNA, 19 bp, Homo Sapiens
tcatccatccgacattgaa

SEQ ID NO: 1704 - DNA, 19 bp, Homo Sapiens
catccatccgacattgaag

SEQ ID NO: 1705 - DNA, 19 bp, Homo Sapiens
atccatccgacattgaagt

SEQ ID NO: 1706 - DNA, 19 bp, Homo Sapiens
tccatccgacattgaagtt

SEQ ID NO: 1707 - DNA, 19 bp, Homo Sapiens
ccatccgacattgaagttg

SEQ ID NO: 1708 - DNA, 19 bp, Homo Sapiens
catccgacattgaagttga

SEQ ID NO: 1709 - DNA, 19 bp, Homo Sapiens
atccgacattgaagttgac

SEQ ID NO: 1710 - DNA, 19 bp, Homo Sapiens
tccgacattgaagttgact

SEQ ID NO: 1711 - DNA, 19 bp, Homo Sapiens
ccgacattgaagttgactt

SEQ ID NO: 1712 - DNA, 19 bp, Homo Sapiens
cgacattgaagttgactta

SEQ ID NO: 1713 - DNA, 19 bp, Homo Sapiens
gacattgaagttgacttac

SEQ ID NO: 1714 - DNA, 19 bp, Homo Sapiens
acattgaagttgacttact

SEQ ID NO: 1715 - DNA, 19 bp, Homo Sapiens
cattgaagttgacttactg

SEQ ID NO: 1716 - DNA, 19 bp, Homo Sapiens
attgaagttgacttactga

SEQ ID NO: 1717 - DNA, 19 bp, Homo Sapiens
ttgaagttgacttactgaa

SEQ ID NO: 1718 - DNA, 19 bp, Homo Sapiens
tgaagttgacttactgaag

SEQ ID NO: 1719 - DNA, 19 bp, Homo Sapiens
gaagttgacttactgaaga

SEQ ID NO: 1720 - DNA, 19 bp, Homo Sapiens
aagttgacttactgaagaa

SEQ ID NO: 1721 - DNA, 19 bp, Homo Sapiens
agttgacttactgaagaat

SEQ ID NO: 1722 - DNA, 19 bp, Homo Sapiens
gttgacttactgaagaatg

SEQ ID NO: 1723 - DNA, 19 bp, Homo Sapiens
ttgacttactgaagaatgg

SEQ ID NO: 1724 - DNA, 19 bp, Homo Sapiens
tgacttactgaagaatgga

SEQ ID NO: 1725 - DNA, 19 bp, Homo Sapiens
gacttactgaagaatggag

SEQ ID NO: 1726 - DNA, 19 bp, Homo Sapiens
acttactgaagaatggaga

SEQ ID NO: 1727 - DNA, 19 bp, Homo Sapiens
cttactgaagaatggagag

SEQ ID NO: 1728 - DNA, 19 bp, Homo Sapiens
ttactgaagaatggagaga

SEQ ID NO: 1729 - DNA, 19 bp, Homo Sapiens
tactgaagaatggagagag

SEQ ID NO: 1730 - DNA, 19 bp, Homo Sapiens
actgaagaatggagagaga

SEQ ID NO: 1731 - DNA, 19 bp, Homo Sapiens
ctgaagaatggagagagaa

SEQ ID NO: 1732 - DNA, 19 bp, Homo Sapiens
tgaagaatggagagagaat

SEQ ID NO: 1733 - DNA, 19 bp, Homo Sapiens
gaagaatggagagagaatt

SEQ ID NO: 1734 - DNA, 19 bp, Homo Sapiens
aagaatggagagagaattg

SEQ ID NO: 1735 - DNA, 19 bp, Homo Sapiens
agaatggagagagaattga

SEQ ID NO: 1736 - DNA, 19 bp, Homo Sapiens
gaatggagagagaattgaa

SEQ ID NO: 1737 - DNA, 19 bp, Homo Sapiens
aatggagagagaattgaaa

SEQ ID NO: 1738 - DNA, 19 bp, Homo Sapiens
aaagtggagcattcagact

SEQ ID NO: 1739 - DNA, 19 bp, Homo Sapiens
aagtggagcattcagactt

SEQ ID NO: 1740 - DNA, 19 bp, Homo Sapiens
agtggagcattcagacttg

SEQ ID NO: 1741 - DNA, 19 bp, Homo Sapiens
gtggagcattcagacttgt

SEQ ID NO: 1742 - DNA, 19 bp, Homo Sapiens
tggagcattcagacttgtc

SEQ ID NO: 1743 - DNA, 19 bp, Homo Sapiens
ggagcattcagacttgtct

SEQ ID NO: 1744 - DNA, 19 bp, Homo Sapiens
gagcattcagacttgtctt

SEQ ID NO: 1745 - DNA, 19 bp, Homo Sapiens
agcattcagacttgtcttt

SEQ ID NO: 1746 - DNA, 19 bp, Homo Sapiens
gcattcagacttgtctttc

SEQ ID NO: 1747 - DNA, 19 bp, Homo Sapiens
cattcagacttgtctttca

SEQ ID NO: 1748 - DNA, 19 bp, Homo Sapiens
attcagacttgtctttcag

SEQ ID NO: 1749 - DNA, 19 bp, Homo Sapiens
ttcagacttgtctttcagc

SEQ ID NO: 1750 - DNA, 19 bp, Homo Sapiens
tcagacttgtctttcagca

SEQ ID NO: 1751 - DNA, 19 bp, Homo Sapiens
cagacttgtctttcagcaa

SEQ ID NO: 1752 - DNA, 19 bp, Homo Sapiens
agacttgtctttcagcaag

SEQ ID NO: 1753 - DNA, 19 bp, Homo Sapiens
gacttgtctttcagcaagg

SEQ ID NO: 1754 - DNA, 19 bp, Homo Sapiens
acttgtctttcagcaagga

SEQ ID NO: 1755 - DNA, 19 bp, Homo Sapiens
cttgtctttcagcaaggac

SEQ ID NO: 1756 - DNA, 19 bp, Homo Sapiens
ttgtctttcagcaaggact

SEQ ID NO: 1757 - DNA, 19 bp, Homo Sapiens
tgtctttcagcaaggactg

SEQ ID NO: 1758 - DNA, 19 bp, Homo Sapiens
gtctttcagcaaggactgg

SEQ ID NO: 1759 - DNA, 19 bp, Homo Sapiens
tctttcagcaaggactggt

SEQ ID NO: 1760 - DNA, 19 bp, Homo Sapiens
ctttcagcaaggactggtc

SEQ ID NO: 1761 - DNA, 19 bp, Homo Sapiens
tttcagcaaggactggtct

SEQ ID NO: 1762 - DNA, 19 bp, Homo Sapiens
ttcagcaaggactggtctt

SEQ ID NO: 1763 - DNA, 19 bp, Homo Sapiens
tcagcaaggactggtcttt

SEQ ID NO: 1764 - DNA, 19 bp, Homo Sapiens
cagcaaggactggtctttc

SEQ ID NO: 1765 - DNA, 19 bp, Homo Sapiens
agcaaggactggtctttct

SEQ ID NO: 1766 - DNA, 19 bp, Homo Sapiens
gcaaggactggtctttcta

SEQ ID NO: 1767 - DNA, 19 bp, Homo Sapiens
caaggactggtctttctat

SEQ ID NO: 1768 - DNA, 19 bp, Homo Sapiens
aaggactggtctttctatc

SEQ ID NO: 1769 - DNA, 19 bp, Homo Sapiens
aggactggtctttctatct

SEQ ID NO: 1770 - DNA, 19 bp, Homo Sapiens
ggactggtctttctatctc

SEQ ID NO: 1771 - DNA, 19 bp, Homo Sapiens
gactggtctttctatctct

SEQ ID NO: 1772 - DNA, 19 bp, Homo Sapiens
actggtctttctatctctt

SEQ ID NO: 1773 - DNA, 19 bp, Homo Sapiens
ctggtctttctatctcttg

SEQ ID NO: 1774 - DNA, 19 bp, Homo Sapiens
tggtctttctatctcttgt

SEQ ID NO: 1775 - DNA, 19 bp, Homo Sapiens
ggtctttctatctcttgta

SEQ ID NO: 1776 - DNA, 19 bp, Homo Sapiens
gtctttctatctcttgtac

SEQ ID NO: 1777 - DNA, 19 bp, Homo Sapiens
tctttctatctcttgtact

SEQ ID NO: 1778 - DNA, 19 bp, Homo Sapiens
ctttctatctcttgtacta

SEQ ID NO: 1779 - DNA, 19 bp, Homo Sapiens
tttctatctcttgtactac

SEQ ID NO: 1780 - DNA, 19 bp, Homo Sapiens
ttctatctcttgtactaca

SEQ ID NO: 1781 - DNA, 19 bp, Homo Sapiens
tctatctcttgtactacac

SEQ ID NO: 1782 - DNA, 19 bp, Homo Sapiens
ctatctcttgtactacact

SEQ ID NO: 1783 - DNA, 19 bp, Homo Sapiens
tatctcttgtactacactg

SEQ ID NO: 1784 - DNA, 19 bp, Homo Sapiens
atctcttgtactacactga

SEQ ID NO: 1785 - DNA, 19 bp, Homo Sapiens
tctcttgtactacactgaa

SEQ ID NO: 1786 - DNA, 19 bp, Homo Sapiens
ctcttgtactacactgaat

SEQ ID NO: 1787 - DNA, 19 bp, Homo Sapiens
tcttgtactacactgaatt

SEQ ID NO: 1788 - DNA, 19 bp, Homo Sapiens
cttgtactacactgaattc

SEQ ID NO: 1789 - DNA, 19 bp, Homo Sapiens
ttgtactacactgaattca

SEQ ID NO: 1790 - DNA, 19 bp, Homo Sapiens
tgtactacactgaattcac

SEQ ID NO: 1791 - DNA, 19 bp, Homo Sapiens
gtactacactgaattcacc

SEQ ID NO: 1792 - DNA, 19 bp, Homo Sapiens
tactacactgaattcaccc

SEQ ID NO: 1793 - DNA, 19 bp, Homo Sapiens
aaagatgagtatgcctgcc

SEQ ID NO: 1794 - DNA, 19 bp, Homo Sapiens
aagatgagtatgcctgccg

SEQ ID NO: 1795 - DNA, 19 bp, Homo Sapiens
agatgagtatgcctgccgt

SEQ ID NO: 1796 - DNA, 19 bp, Homo Sapiens
gatgagtatgcctgccgtg

SEQ ID NO: 1797 - DNA, 19 bp, Homo Sapiens
atgagtatgcctgccgtgt

SEQ ID NO: 1798 - DNA, 19 bp, Homo Sapiens
tgagtatgcctgccgtgtg

SEQ ID NO: 1799 - DNA, 19 bp, Homo Sapiens
gagtatgcctgccgtgtga

SEQ ID NO: 1800 - DNA, 19 bp, Homo Sapiens
agtatgcctgccgtgtgaa

SEQ ID NO: 1801 - DNA, 19 bp, Homo Sapiens
gtatgcctgccgtgtgaac

SEQ ID NO: 1802 - DNA, 19 bp, Homo Sapiens
tatgcctgccgtgtgaacc

SEQ ID NO: 1803 - DNA, 19 bp, Homo Sapiens
atgcctgccgtgtgaacca

SEQ ID NO: 1804 - DNA, 19 bp, Homo Sapiens
tgcctgccgtgtgaaccat

SEQ ID NO: 1805 - DNA, 19 bp, Homo Sapiens
cctgccgtgtgaaccatgt

SEQ ID NO: 1806 - DNA, 19 bp, Homo Sapiens
ctgccgtgtgaaccatgtg

SEQ ID NO: 1807 - DNA, 19 bp, Homo Sapiens
tgccgtgtgaaccatgtga

SEQ ID NO: 1808 - DNA, 19 bp, Homo Sapiens
gccgtgtgaaccatgtgac

SEQ ID NO: 1809 - DNA, 19 bp, Homo Sapiens
ccgtgtgaaccatgtgact

SEQ ID NO: 1810 - DNA, 19 bp, Homo Sapiens
cgtgtgaaccatgtgactt

SEQ ID NO: 1811 - DNA, 19 bp, Homo Sapiens
gtgtgaaccatgtgacttt

SEQ ID NO: 1812 - DNA, 19 bp, Homo Sapiens
tgtgaaccatgtgactttg

SEQ ID NO: 1813 - DNA, 19 bp, Homo Sapiens
gtgaaccatgtgactttgt

SEQ ID NO: 1814 - DNA, 19 bp, Homo Sapiens
tgaaccatgtgactttgtc

SEQ ID NO: 1815 - DNA, 19 bp, Homo Sapiens
gaaccatgtgactttgtca

SEQ ID NO: 1816 - DNA, 19 bp, Homo Sapiens
aaccatgtgactttgtcac

SEQ ID NO: 1817 - DNA, 19 bp, Homo Sapiens
accatgtgactttgtcaca

SEQ ID NO: 1818 - DNA, 19 bp, Homo Sapiens
ccatgtgactttgtcacag

SEQ ID NO: 1819 - DNA, 19 bp, Homo Sapiens
catgtgactttgtcacagc

SEQ ID NO: 1820 - DNA, 19 bp, Homo Sapiens
atgtgactttgtcacagcc

SEQ ID NO: 1821 - DNA, 19 bp, Homo Sapiens
tgtgactttgtcacagccc

SEQ ID NO: 1822 - DNA, 19 bp, Homo Sapiens
gtgactttgtcacagccca

SEQ ID NO: 1823 - DNA, 19 bp, Homo Sapiens
tgactttgtcacagcccaa

SEQ ID NO: 1824 - DNA, 19 bp, Homo Sapiens
gactttgtcacagcccaag

SEQ ID NO: 1825 - DNA, 19 bp, Homo Sapiens
actttgtcacagcccaaga

SEQ ID NO: 1826 - DNA, 19 bp, Homo Sapiens
ctttgtcacagcccaagat

SEQ ID NO: 1827 - DNA, 19 bp, Homo Sapiens
tttgtcacagcccaagata

SEQ ID NO: 1828 - DNA, 19 bp, Homo Sapiens
ttgtcacagcccaagatag

SEQ ID NO: 1829 - DNA, 19 bp, Homo Sapiens
tgtcacagcccaagatagt

SEQ ID NO: 1830 - DNA, 19 bp, Homo Sapiens
gtcacagcccaagatagtt

SEQ ID NO: 1831 - DNA, 19 bp, Homo Sapiens
tcacagcccaagatagtta

SEQ ID NO: 1832 - DNA, 19 bp, Homo Sapiens
cacagcccaagatagttaa

SEQ ID NO: 1833 - DNA, 19 bp, Homo Sapiens
acagcccaagatagttaag

SEQ ID NO: 1834 - DNA, 19 bp, Homo Sapiens
cagcccaagatagttaagt

SEQ ID NO: 1835 - DNA, 19 bp, Homo Sapiens
agcccaagatagttaagtg

SEQ ID NO: 1836 - DNA, 19 bp, Homo Sapiens
gcccaagatagttaagtgg

SEQ ID NO: 1837 - DNA, 19 bp, Homo Sapiens
cccaagatagttaagtggg

SEQ ID NO: 1838 - DNA, 19 bp, Homo Sapiens
ccaagatagttaagtggga

SEQ ID NO: 1839 - DNA, 19 bp, Homo Sapiens
caagatagttaagtgggat

SEQ ID NO: 1840 - DNA, 19 bp, Homo Sapiens
aagatagttaagtgggatc

SEQ ID NO: 1841 - DNA, 19 bp, Homo Sapiens
agatagttaagtgggatcg

SEQ ID NO: 1842 - DNA, 19 bp, Homo Sapiens
gatagttaagtgggatcga

SEQ ID NO: 1843 - DNA, 19 bp, Homo Sapiens
atagttaagtgggatcgag

SEQ ID NO: 1844 - DNA, 19 bp, Homo Sapiens
tagttaagtgggatcgaga

SEQ ID NO: 1845 - DNA, 19 bp, Homo Sapiens
agttaagtgggatcgagac

SEQ ID NO: 1846 - DNA, 19 bp, Homo Sapiens
gttaagtgggatcgagaca

SEQ ID NO: 1847 - DNA, 19 bp, Homo Sapiens
ttaagtgggatcgagacat

SEQ ID NO: 1848 - DNA, 19 bp, Homo Sapiens
taagtgggatcgagacatg

SEQ ID NO: 1849 - DNA, 19 bp, Homo Sapiens
aagtgggatcgagacatgt

SEQ ID NO: 1850 - DNA, 19 bp, Homo Sapiens
agtgggatcgagacatgta

SEQ ID NO: 1851 - DNA, 19 bp, Homo Sapiens
gtgggatcgagacatgtaa

SEQ ID NO: 1852 - DNA, 19 bp, Homo Sapiens
tgggatcgagacatgtaag

SEQ ID NO: 1853 - DNA, 19 bp, Homo Sapiens
gggatcgagacatgtaagc

SEQ ID NO: 1854 - DNA, 19 bp, Homo Sapiens
ggatcgagacatgtaagca

SEQ ID NO: 1855 - DNA, 19 bp, Homo Sapiens
gatcgagacatgtaagcag

SEQ ID NO: 1856 - DNA, 19 bp, Homo Sapiens
atcgagacatgtaagcagc

SEQ ID NO: 1857 - DNA, 19 bp, Homo Sapiens
tcgagacatgtaagcagca

SEQ ID NO: 1858 - DNA, 19 bp, Homo Sapiens
cgagacatgtaagcagcat

SEQ ID NO: 1859 - DNA, 19 bp, Homo Sapiens
gagacatgtaagcagcatc

SEQ ID NO: 1860 - DNA, 19 bp, Homo Sapiens
agacatgtaagcagcatca

SEQ ID NO: 1861 - DNA, 19 bp, Homo Sapiens
gacatgtaagcagcatcat

SEQ ID NO: 1862 - DNA, 19 bp, Homo Sapiens
acatgtaagcagcatcatg

SEQ ID NO: 1863 - DNA, 19 bp, Homo Sapiens
catgtaagcagcatcatgg

SEQ ID NO: 1864 - DNA, 19 bp, Homo Sapiens
atgtaagcagcatcatgga

SEQ ID NO: 1865 - DNA, 19 bp, Homo Sapiens
tgtaagcagcatcatggag

SEQ ID NO: 1866 - DNA, 19 bp, Homo Sapiens
gtaagcagcatcatggagg

SEQ ID NO: 1867 - DNA, 19 bp, Homo Sapiens
taagcagcatcatggaggt

SEQ ID NO: 1868 - DNA, 19 bp, Homo Sapiens
aagcagcatcatggaggtt

SEQ ID NO: 1869 - DNA, 19 bp, Homo Sapiens
agcagcatcatggaggttt

SEQ ID NO: 1870 - DNA, 19 bp, Homo Sapiens
gcagcatcatggaggtttg

SEQ ID NO: 1871 - DNA, 19 bp, Homo Sapiens
cagcatcatggaggtttga

SEQ ID NO: 1872 - DNA, 19 bp, Homo Sapiens
agcatcatggaggtttgaa

SEQ ID NO: 1873 - DNA, 19 bp, Homo Sapiens
gcatcatggaggtttgaag

SEQ ID NO: 1874 - DNA, 19 bp, Homo Sapiens
catcatggaggtttgaaga

SEQ ID NO: 1875 - DNA, 19 bp, Homo Sapiens
atcatggaggtttgaagat

SEQ ID NO: 1876 - DNA, 19 bp, Homo Sapiens
tcatggaggtttgaagatg

SEQ ID NO: 1877 - DNA, 19 bp, Homo Sapiens
catggaggtttgaagatgc

SEQ ID NO: 1878 - DNA, 19 bp, Homo Sapiens
atggaggtttgaagatgcc

SEQ ID NO: 1879 - DNA, 19 bp, Homo Sapiens
tggaggtttgaagatgccg

SEQ ID NO: 1880 - DNA, 19 bp, Homo Sapiens
ggaggtttgaagatgccgc

SEQ ID NO: 1881 - DNA, 19 bp, Homo Sapiens
gaggtttgaagatgccgca

SEQ ID NO: 1882 - DNA, 19 bp, Homo Sapiens
aggtttgaagatgccgcat

SEQ ID NO: 1883 - DNA, 19 bp, Homo Sapiens
ggtttgaagatgccgcatt

SEQ ID NO: 1884 - DNA, 19 bp, Homo Sapiens
gtttgaagatgccgcattt

SEQ ID NO: 1885 - DNA, 19 bp, Homo Sapiens
tttgaagatgccgcatttg

SEQ ID NO: 1886 - DNA, 19 bp, Homo Sapiens
ttgaagatgccgcatttgg

SEQ ID NO: 1887 - DNA, 19 bp, Homo Sapiens
tgaagatgccgcatttgga

SEQ ID NO: 1888 - DNA, 19 bp, Homo Sapiens
gaagatgccgcatttggat

SEQ ID NO: 1889 - DNA, 19 bp, Homo Sapiens
aagatgccgcatttggatt

SEQ ID NO: 1890 - DNA, 19 bp, Homo Sapiens
agatgccgcatttggattg

SEQ ID NO: 1891 - DNA, 19 bp, Homo Sapiens
gatgccgcatttggattgg

SEQ ID NO: 1892 - DNA, 19 bp, Homo Sapiens
atgccgcatttggattgga

SEQ ID NO: 1893 - DNA, 19 bp, Homo Sapiens
tgccgcatttggattggat

SEQ ID NO: 1894 - DNA, 19 bp, Homo Sapiens
gccgcatttggattggatg

SEQ ID NO: 1895 - DNA, 19 bp, Homo Sapiens
ccgcatttggattggatga

SEQ ID NO: 1896 - DNA, 19 bp, Homo Sapiens
cgcatttggattggatgaa

SEQ ID NO: 1897 - DNA, 19 bp, Homo Sapiens
gcatttggattggatgaat

SEQ ID NO: 1898 - DNA, 19 bp, Homo Sapiens
catttggattggatgaatt

SEQ ID NO: 1899 - DNA, 19 bp, Homo Sapiens
atttggattggatgaattc

SEQ ID NO: 1900 - DNA, 19 bp, Homo Sapiens
tttggattggatgaattcc

SEQ ID NO: 1901 - DNA, 19 bp, Homo Sapiens
ttggattggatgaattcca

SEQ ID NO: 1902 - DNA, 19 bp, Homo Sapiens
tggattggatgaattccaa

SEQ ID NO: 1903 - DNA, 19 bp, Homo Sapiens
ggattggatgaattccaaa

SEQ ID NO: 1904 - DNA, 19 bp, Homo Sapiens
gattggatgaattccaaat

SEQ ID NO: 1905 - DNA, 19 bp, Homo Sapiens
attggatgaattccaaatt

SEQ ID NO: 1906 - DNA, 19 bp, Homo Sapiens
ttggatgaattccaaattc

SEQ ID NO: 1907 - DNA, 19 bp, Homo Sapiens
tggatgaattccaaattct

SEQ ID NO: 1908 - DNA, 19 bp, Homo Sapiens
ggatgaattccaaattctg

SEQ ID NO: 1909 - DNA, 19 bp, Homo Sapiens
gatgaattccaaattctgc

SEQ ID NO: 1910 - DNA, 19 bp, Homo Sapiens
atgaattccaaattctgct

SEQ ID NO: 1911 - DNA, 19 bp, Homo Sapiens
tgaattccaaattctgctt

SEQ ID NO: 1912 - DNA, 19 bp, Homo Sapiens
gaattccaaattctgcttg

SEQ ID NO: 1913 - DNA, 19 bp, Homo Sapiens
aattccaaattctgcttgc

SEQ ID NO: 1914 - DNA, 19 bp, Homo Sapiens
attccaaattctgcttgct

SEQ ID NO: 1915 - DNA, 19 bp, Homo Sapiens
ttccaaattctgcttgctt

SEQ ID NO: 1916 - DNA, 19 bp, Homo Sapiens
tccaaattctgcttgcttg

SEQ ID NO: 1917 - DNA, 19 bp, Homo Sapiens
ccaaattctgcttgcttgc

SEQ ID NO: 1918 - DNA, 19 bp, Homo Sapiens
caaattctgcttgcttgct

SEQ ID NO: 1919 - DNA, 19 bp, Homo Sapiens
aaattctgcttgcttgctt

SEQ ID NO: 1920 - DNA, 19 bp, Homo Sapiens
aattctgcttgcttgcttt

SEQ ID NO: 1921 - DNA, 19 bp, Homo Sapiens
tattgatatgcttatacac

SEQ ID NO: 1922 - DNA, 19 bp, Homo Sapiens
attgatatgcttatacact

SEQ ID NO: 1923 - DNA, 19 bp, Homo Sapiens
ttgatatgcttatacactt

SEQ ID NO: 1924 - DNA, 19 bp, Homo Sapiens
tgatatgcttatacactta

SEQ ID NO: 1925 - DNA, 19 bp, Homo Sapiens
gatatgcttatacacttac

SEQ ID NO: 1926 - DNA, 19 bp, Homo Sapiens
atatgcttatacacttaca

SEQ ID NO: 1927 - DNA, 19 bp, Homo Sapiens
tatgcttatacacttacac

SEQ ID NO: 1928 - DNA, 19 bp, Homo Sapiens
atgcttatacacttacact

SEQ ID NO: 1929 - DNA, 19 bp, Homo Sapiens
tgcttatacacttacactt

SEQ ID NO: 1930 - DNA, 19 bp, Homo Sapiens
gcttatacacttacacttt

SEQ ID NO: 1931 - DNA, 19 bp, Homo Sapiens
cttatacacttacacttta

SEQ ID NO: 1932 - DNA, 19 bp, Homo Sapiens
tatacacttacactttatg

SEQ ID NO: 1933 - DNA, 19 bp, Homo Sapiens
atacacttacactttatgc

SEQ ID NO: 1934 - DNA, 19 bp, Homo Sapiens
tacacttacactttatgca

SEQ ID NO: 1935 - DNA, 19 bp, Homo Sapiens
acacttacactttatgcac

SEQ ID NO: 1936 - DNA, 19 bp, Homo Sapiens
cacttacactttatgcaca

SEQ ID NO: 1937 - DNA, 19 bp, Homo Sapiens
acttacactttatgcacaa

SEQ ID NO: 1938 - DNA, 19 bp, Homo Sapiens
cttacactttatgcacaaa

SEQ ID NO: 1939 - DNA, 19 bp, Homo Sapiens
atgtagggttataataatg

SEQ ID NO: 1940 - DNA, 19 bp, Homo Sapiens
tgtagggttataataatgt

SEQ ID NO: 1941 - DNA, 19 bp, Homo Sapiens
gtagggttataataatgtt

SEQ ID NO: 1942 - DNA, 19 bp, Homo Sapiens
gggttataataatgttaac

SEQ ID NO: 1943 - DNA, 19 bp, Homo Sapiens
taataatgttaacatggac

SEQ ID NO: 1944 - DNA, 19 bp, Homo Sapiens
aataatgttaacatggaca

SEQ ID NO: 1945 - DNA, 19 bp, Homo Sapiens
ataatgttaacatggacat

SEQ ID NO: 1946 - DNA, 19 bp, Homo Sapiens
taatgttaacatggacatg

SEQ ID NO: 1947 - DNA, 19 bp, Homo Sapiens
aatgttaacatggacatga

SEQ ID NO: 1948 - DNA, 19 bp, Homo Sapiens
atgttaacatggacatgat

SEQ ID NO: 1949 - DNA, 19 bp, Homo Sapiens
tgttaacatggacatgatc

SEQ ID NO: 1950 - DNA, 19 bp, Homo Sapiens
gttaacatggacatgatct

SEQ ID NO: 1951 - DNA, 19 bp, Homo Sapiens
ttaacatggacatgatctt

SEQ ID NO: 1952 - DNA, 19 bp, Homo Sapiens
taacatggacatgatcttc

SEQ ID NO: 1953 - DNA, 19 bp, Homo Sapiens
aacatggacatgatcttct

SEQ ID NO: 1954 - DNA, 19 bp, Homo Sapiens
acatggacatgatcttctt

SEQ ID NO: 1955 - DNA, 19 bp, Homo Sapiens
catggacatgatcttcttt

SEQ ID NO: 1956 - DNA, 19 bp, Homo Sapiens
atggacatgatcttcttta

SEQ ID NO: 1957 - DNA, 19 bp, Homo Sapiens
tggacatgatcttctttat

SEQ ID NO: 1958 - DNA, 19 bp, Homo Sapiens
ggacatgatcttctttata

SEQ ID NO: 1959 - DNA, 19 bp, Homo Sapiens
gacatgatcttctttataa

SEQ ID NO: 1960 - DNA, 19 bp, Homo Sapiens
tataattctactttgagtg

SEQ ID NO: 1961 - DNA, 19 bp, Homo Sapiens
ataattctactttgagtgc

SEQ ID NO: 1962 - DNA, 19 bp, Homo Sapiens
taattctactttgagtgct

SEQ ID NO: 1963 - DNA, 19 bp, Homo Sapiens
aattctactttgagtgctg

SEQ ID NO: 1964 - DNA, 19 bp, Homo Sapiens
attctactttgagtgctgt

SEQ ID NO: 1965 - DNA, 19 bp, Homo Sapiens
ttctactttgagtgctgtc

SEQ ID NO: 1966 - DNA, 19 bp, Homo Sapiens
tctactttgagtgctgtct

SEQ ID NO: 1967 - DNA, 19 bp, Homo Sapiens
ctactttgagtgctgtctc

SEQ ID NO: 1968 - DNA, 19 bp, Homo Sapiens
tactttgagtgctgtctcc

SEQ ID NO: 1969 - DNA, 19 bp, Homo Sapiens
actttgagtgctgtctcca

SEQ ID NO: 1970 - DNA, 19 bp, Homo Sapiens
ctttgagtgctgtctccat

SEQ ID NO: 1971 - DNA, 19 bp, Homo Sapiens
tttgagtgctgtctccatg

SEQ ID NO: 1972 - DNA, 19 bp, Homo Sapiens
ttgagtgctgtctccatgt

SEQ ID NO: 1973 - DNA, 19 bp, Homo Sapiens
tgagtgctgtctccatgtt

SEQ ID NO: 1974 - DNA, 19 bp, Homo Sapiens
gagtgctgtctccatgttt

SEQ ID NO: 1975 - DNA, 19 bp, Homo Sapiens
agtgctgtctccatgtttg

SEQ ID NO: 1976 - DNA, 19 bp, Homo Sapiens
gtgctgtctccatgtttga

SEQ ID NO: 1977 - DNA, 19 bp, Homo Sapiens
tgctgtctccatgtttgat

SEQ ID NO: 1978 - DNA, 19 bp, Homo Sapiens
gctgtctccatgtttgatg

SEQ ID NO: 1979 - DNA, 19 bp, Homo Sapiens
ctgtctccatgtttgatgt

SEQ ID NO: 1980 - DNA, 19 bp, Homo Sapiens
tgtctccatgtttgatgta

SEQ ID NO: 1981 - DNA, 19 bp, Homo Sapiens
gtctccatgtttgatgtat

SEQ ID NO: 1982 - DNA, 19 bp, Homo Sapiens
tctccatgtttgatgtatc

SEQ ID NO: 1983 - DNA, 19 bp, Homo Sapiens
ctccatgtttgatgtatct

SEQ ID NO: 1984 - DNA, 19 bp, Homo Sapiens
tccatgtttgatgtatctg

SEQ ID NO: 1985 - DNA, 19 bp, Homo Sapiens
ccatgtttgatgtatctga

SEQ ID NO: 1986 - DNA, 19 bp, Homo Sapiens
catgtttgatgtatctgag

SEQ ID NO: 1987 - DNA, 19 bp, Homo Sapiens
atgtttgatgtatctgagc

SEQ ID NO: 1988 - DNA, 19 bp, Homo Sapiens
tgtttgatgtatctgagca

SEQ ID NO: 1989 - DNA, 19 bp, Homo Sapiens
gtttgatgtatctgagcag

SEQ ID NO: 1990 - DNA, 19 bp, Homo Sapiens
tttgatgtatctgagcagg

SEQ ID NO: 1991 - DNA, 19 bp, Homo Sapiens
ttgatgtatctgagcaggt

SEQ ID NO: 1992 - DNA, 19 bp, Homo Sapiens
tgatgtatctgagcaggtt

SEQ ID NO: 1993 - DNA, 19 bp, Homo Sapiens
gatgtatctgagcaggttg

SEQ ID NO: 1994 - DNA, 19 bp, Homo Sapiens
atgtatctgagcaggttgc

SEQ ID NO: 1995 - DNA, 19 bp, Homo Sapiens
tgtatctgagcaggttgct

SEQ ID NO: 1996 - DNA, 19 bp, Homo Sapiens
gtatctgagcaggttgctc

SEQ ID NO: 1997 - DNA, 19 bp, Homo Sapiens
tatctgagcaggttgctcc

SEQ ID NO: 1998 - DNA, 19 bp, Homo Sapiens
atctgagcaggttgctcca

SEQ ID NO: 1999 - DNA, 19 bp, Homo Sapiens
tctgagcaggttgctccac

SEQ ID NO: 2000 - DNA, 19 bp, Homo Sapiens
ctgagcaggttgctccaca

SEQ ID NO: 2001 - DNA, 19 bp, Homo Sapiens
tgagcaggttgctccacag

SEQ ID NO: 2002 - DNA, 19 bp, Homo Sapiens
agcaggttgctccacaggt

SEQ ID NO: 2003 - DNA, 19 bp, Homo Sapiens
gcaggttgctccacaggta

SEQ ID NO: 2004 - DNA, 19 bp, Homo Sapiens
caggttgctccacaggtag

SEQ ID NO: 2005 - DNA, 19 bp, Homo Sapiens
aggttgctccacaggtagc

SEQ ID NO: 2006 - DNA, 19 bp, Homo Sapiens
ggttgctccacaggtagct

SEQ ID NO: 2007 - DNA, 19 bp, Homo Sapiens
gttgctccacaggtagctc

SEQ ID NO: 2008 - DNA, 19 bp, Homo Sapiens
ttgctccacaggtagctct

SEQ ID NO: 2009 - DNA, 19 bp, Homo Sapiens
tgctccacaggtagctcta

SEQ ID NO: 2010 - DNA, 19 bp, Homo Sapiens
gctccacaggtagctctag

SEQ ID NO: 2011 - DNA, 19 bp, Homo Sapiens
ctccacaggtagctctagg

SEQ ID NO: 2012 - DNA, 19 bp, Homo Sapiens
tccacaggtagctctagga

SEQ ID NO: 2013 - DNA, 19 bp, Homo Sapiens
ccacaggtagctctaggag

SEQ ID NO: 2014 - DNA, 19 bp, Homo Sapiens
cacaggtagctctaggagg

SEQ ID NO: 2015 - DNA, 19 bp, Homo Sapiens
acaggtagctctaggaggg

SEQ ID NO: 2016 - DNA, 19 bp, Homo Sapiens
aggtagctctaggagggct

SEQ ID NO: 2017 - DNA, 19 bp, Homo Sapiens
tctaggagggctggcaact

SEQ ID NO: 2018 - DNA, 19 bp, Homo Sapiens
ctaggagggctggcaactt

SEQ ID NO: 2019 - DNA, 19 bp, Homo Sapiens
taggagggctggcaactta

SEQ ID NO: 2020 - DNA, 19 bp, Homo Sapiens
aggagggctggcaacttag

SEQ ID NO: 2021 - DNA, 19 bp, Homo Sapiens
ggagggctggcaacttaga

SEQ ID NO: 2022 - DNA, 19 bp, Homo Sapiens
gagggctggcaacttagag

SEQ ID NO: 2023 - DNA, 19 bp, Homo Sapiens
agggctggcaacttagagg

SEQ ID NO: 2024 - DNA, 19 bp, Homo Sapiens
gggctggcaacttagaggt

SEQ ID NO: 2025 - DNA, 19 bp, Homo Sapiens
ggctggcaacttagaggtg

SEQ ID NO: 2026 - DNA, 19 bp, Homo Sapiens
gctggcaacttagaggtgg

SEQ ID NO: 2027 - DNA, 19 bp, Homo Sapiens
ctggcaacttagaggtggg

SEQ ID NO: 2028 - DNA, 19 bp, Homo Sapiens
gggagcagagaattctctt

SEQ ID NO: 2029 - DNA, 19 bp, Homo Sapiens
ggagcagagaattctctta

SEQ ID NO: 2030 - DNA, 19 bp, Homo Sapiens
gagcagagaattctcttat

SEQ ID NO: 2031 - DNA, 19 bp, Homo Sapiens
agcagagaattctcttatc

SEQ ID NO: 2032 - DNA, 19 bp, Homo Sapiens
gcagagaattctcttatcc

SEQ ID NO: 2033 - DNA, 19 bp, Homo Sapiens
cagagaattctcttatcca

SEQ ID NO: 2034 - DNA, 19 bp, Homo Sapiens
agagaattctcttatccaa

SEQ ID NO: 2035 - DNA, 19 bp, Homo Sapiens
gagaattctcttatccaac

SEQ ID NO: 2036 - DNA, 19 bp, Homo Sapiens
agaattctcttatccaaca

SEQ ID NO: 2037 - DNA, 19 bp, Homo Sapiens
gaattctcttatccaacat

SEQ ID NO: 2038 - DNA, 19 bp, Homo Sapiens
aattctcttatccaacatc

SEQ ID NO: 2039 - DNA, 19 bp, Homo Sapiens
attctcttatccaacatca

SEQ ID NO: 2040 - DNA, 19 bp, Homo Sapiens
ttctcttatccaacatcaa

SEQ ID NO: 2041 - DNA, 19 bp, Homo Sapiens
tctcttatccaacatcaac

SEQ ID NO: 2042 - DNA, 19 bp, Homo Sapiens
ctcttatccaacatcaaca

SEQ ID NO: 2043 - DNA, 19 bp, Homo Sapiens
tcttatccaacatcaacat

SEQ ID NO: 2044 - DNA, 19 bp, Homo Sapiens
cttatccaacatcaacatc

SEQ ID NO: 2045 - DNA, 19 bp, Homo Sapiens
ttatccaacatcaacatct

SEQ ID NO: 2046 - DNA, 19 bp, Homo Sapiens
tatccaacatcaacatctt

SEQ ID NO: 2047 - DNA, 19 bp, Homo Sapiens
atccaacatcaacatcttg

SEQ ID NO: 2048 - DNA, 19 bp, Homo Sapiens
tccaacatcaacatcttgg

SEQ ID NO: 2049 - DNA, 19 bp, Homo Sapiens
ccaacatcaacatcttggt

SEQ ID NO: 2050 - DNA, 19 bp, Homo Sapiens
caacatcaacatcttggtc

SEQ ID NO: 2051 - DNA, 19 bp, Homo Sapiens
aacatcaacatcttggtca

SEQ ID NO: 2052 - DNA, 19 bp, Homo Sapiens
acatcaacatcttggtcag

SEQ ID NO: 2053 - DNA, 19 bp, Homo Sapiens
catcaacatcttggtcaga

SEQ ID NO: 2054 - DNA, 19 bp, Homo Sapiens
atcaacatcttggtcagat

SEQ ID NO: 2055 - DNA, 19 bp, Homo Sapiens
tcaacatcttggtcagatt

SEQ ID NO: 2056 - DNA, 19 bp, Homo Sapiens
caacatcttggtcagattt

SEQ ID NO: 2057 - DNA, 19 bp, Homo Sapiens
aacatcttggtcagatttg

SEQ ID NO: 2058 - DNA, 19 bp, Homo Sapiens
acatcttggtcagatttga

SEQ ID NO: 2059 - DNA, 19 bp, Homo Sapiens
catcttggtcagatttgaa

SEQ ID NO: 2060 - DNA, 19 bp, Homo Sapiens
atcttggtcagatttgaac

SEQ ID NO: 2061 - DNA, 19 bp, Homo Sapiens
tcttggtcagatttgaact

SEQ ID NO: 2062 - DNA, 19 bp, Homo Sapiens
cttggtcagatttgaactc

SEQ ID NO: 2063 - DNA, 19 bp, Homo Sapiens
ttggtcagatttgaactct

SEQ ID NO: 2064 - DNA, 19 bp, Homo Sapiens
tggtcagatttgaactctt

SEQ ID NO: 2065 - DNA, 19 bp, Homo Sapiens
ggtcagatttgaactcttc

SEQ ID NO: 2066 - DNA, 19 bp, Homo Sapiens
gtcagatttgaactcttca

SEQ ID NO: 2067 - DNA, 19 bp, Homo Sapiens
tcagatttgaactcttcaa

SEQ ID NO: 2068 - DNA, 19 bp, Homo Sapiens
cagatttgaactcttcaat

SEQ ID NO: 2069 - DNA, 19 bp, Homo Sapiens
agatttgaactcttcaatc

SEQ ID NO: 2070 - DNA, 19 bp, Homo Sapiens
gatttgaactcttcaatct

SEQ ID NO: 2071 - DNA, 19 bp, Homo Sapiens
atttgaactcttcaatctc

SEQ ID NO: 2072 - DNA, 19 bp, Homo Sapiens
tttgaactcttcaatctct

SEQ ID NO: 2073 - DNA, 19 bp, Homo Sapiens
ttgaactcttcaatctctt

SEQ ID NO: 2074 - DNA, 19 bp, Homo Sapiens
tgaactcttcaatctcttg

SEQ ID NO: 2075 - DNA, 19 bp, Homo Sapiens
gaactcttcaatctcttgc

SEQ ID NO: 2076 - DNA, 19 bp, Homo Sapiens
aactcttcaatctcttgca

SEQ ID NO: 2077 - DNA, 19 bp, Homo Sapiens
actcttcaatctcttgcac

SEQ ID NO: 2078 - DNA, 19 bp, Homo Sapiens
ctcttcaatctcttgcact

SEQ ID NO: 2079 - DNA, 19 bp, Homo Sapiens
tcttcaatctcttgcactc

SEQ ID NO: 2080 - DNA, 19 bp, Homo Sapiens
cttcaatctcttgcactca

SEQ ID NO: 2081 - DNA, 19 bp, Homo Sapiens
ttcaatctcttgcactcaa

SEQ ID NO: 2082 - DNA, 19 bp, Homo Sapiens
tcaatctcttgcactcaaa

SEQ ID NO: 2083 - DNA, 19 bp, Homo Sapiens
caatctcttgcactcaaag

SEQ ID NO: 2084 - DNA, 19 bp, Homo Sapiens
aatctcttgcactcaaagc

SEQ ID NO: 2085 - DNA, 19 bp, Homo Sapiens
atctcttgcactcaaagct

SEQ ID NO: 2086 - DNA, 19 bp, Homo Sapiens
tctcttgcactcaaagctt

SEQ ID NO: 2087 - DNA, 19 bp, Homo Sapiens
ctcttgcactcaaagcttg

SEQ ID NO: 2088 - DNA, 19 bp, Homo Sapiens
tcttgcactcaaagcttgt

SEQ ID NO: 2089 - DNA, 19 bp, Homo Sapiens
cttgcactcaaagcttgtt

SEQ ID NO: 2090 - DNA, 19 bp, Homo Sapiens
ttgcactcaaagcttgtta

SEQ ID NO: 2091 - DNA, 19 bp, Homo Sapiens
tgcactcaaagcttgttaa

SEQ ID NO: 2092 - DNA, 19 bp, Homo Sapiens
gcactcaaagcttgttaag

SEQ ID NO: 2093 - DNA, 19 bp, Homo Sapiens
cactcaaagcttgttaaga

SEQ ID NO: 2094 - DNA, 19 bp, Homo Sapiens
actcaaagcttgttaagat

SEQ ID NO: 2095 - DNA, 19 bp, Homo Sapiens
ctcaaagcttgttaagata

SEQ ID NO: 2096 - DNA, 19 bp, Homo Sapiens
tcaaagcttgttaagatag

SEQ ID NO: 2097 - DNA, 19 bp, Homo Sapiens
caaagcttgttaagatagt

SEQ ID NO: 2098 - DNA, 19 bp, Homo Sapiens
aaagcttgttaagatagtt

SEQ ID NO: 2099 - DNA, 19 bp, Homo Sapiens
aagcttgttaagatagtta

SEQ ID NO: 2100 - DNA, 19 bp, Homo Sapiens
agcttgttaagatagttaa

SEQ ID NO: 2101 - DNA, 19 bp, Homo Sapiens
gcttgttaagatagttaag

SEQ ID NO: 2102 - DNA, 19 bp, Homo Sapiens
cttgttaagatagttaagc

SEQ ID NO: 2103 - DNA, 19 bp, Homo Sapiens
ttgttaagatagttaagcg

SEQ ID NO: 2104 - DNA, 19 bp, Homo Sapiens
tgttaagatagttaagcgt

SEQ ID NO: 2105 - DNA, 19 bp, Homo Sapiens
gttaagatagttaagcgtg

SEQ ID NO: 2106 - DNA, 19 bp, Homo Sapiens
ttaagatagttaagcgtgc

SEQ ID NO: 2107 - DNA, 19 bp, Homo Sapiens
taagatagttaagcgtgca

SEQ ID NO: 2108 - DNA, 19 bp, Homo Sapiens
aagatagttaagcgtgcat

SEQ ID NO: 2109 - DNA, 19 bp, Homo Sapiens
agatagttaagcgtgcata

SEQ ID NO: 2110 - DNA, 19 bp, Homo Sapiens
gatagttaagcgtgcataa

SEQ ID NO: 2111 - DNA, 19 bp, Homo Sapiens
atagttaagcgtgcataag

SEQ ID NO: 2112 - DNA, 19 bp, Homo Sapiens
tagttaagcgtgcataagt

SEQ ID NO: 2113 - DNA, 19 bp, Homo Sapiens
agttaagcgtgcataagtt

SEQ ID NO: 2114 - DNA, 19 bp, Homo Sapiens
gttaagcgtgcataagtta

SEQ ID NO: 2115 - DNA, 19 bp, Homo Sapiens
ttaagcgtgcataagttaa

SEQ ID NO: 2116 - DNA, 19 bp, Homo Sapiens
taagcgtgcataagttaac

SEQ ID NO: 2117 - DNA, 19 bp, Homo Sapiens
aagcgtgcataagttaact

SEQ ID NO: 2118 - DNA, 19 bp, Homo Sapiens
agcgtgcataagttaactt

SEQ ID NO: 2119 - DNA, 19 bp, Homo Sapiens
gcgtgcataagttaacttc

SEQ ID NO: 2120 - DNA, 19 bp, Homo Sapiens
cgtgcataagttaacttcc

SEQ ID NO: 2121 - DNA, 19 bp, Homo Sapiens
gtgcataagttaacttcca

SEQ ID NO: 2122 - DNA, 19 bp, Homo Sapiens
tgcataagttaacttccaa

SEQ ID NO: 2123 - DNA, 19 bp, Homo Sapiens
gcataagttaacttccaat

SEQ ID NO: 2124 - DNA, 19 bp, Homo Sapiens
cataagttaacttccaatt

SEQ ID NO: 2125 - DNA, 19 bp, Homo Sapiens
aagttaacttccaatttac

SEQ ID NO: 2126 - DNA, 19 bp, Homo Sapiens
agttaacttccaatttaca

SEQ ID NO: 2127 - DNA, 19 bp, Homo Sapiens
gttaacttccaatttacat

SEQ ID NO: 2128 - DNA, 19 bp, Homo Sapiens
taacttccaatttacatac

SEQ ID NO: 2129 - DNA, 19 bp, Homo Sapiens
aacttccaatttacatact

SEQ ID NO: 2130 - DNA, 19 bp, Homo Sapiens
acttccaatttacatactc

SEQ ID NO: 2131 - DNA, 19 bp, Homo Sapiens
cttccaatttacatactct

SEQ ID NO: 2132 - DNA, 19 bp, Homo Sapiens
ttccaatttacatactctg

SEQ ID NO: 2133 - DNA, 19 bp, Homo Sapiens
tccaatttacatactctgc

SEQ ID NO: 2134 - DNA, 19 bp, Homo Sapiens
ccaatttacatactctgct

SEQ ID NO: 2135 - DNA, 19 bp, Homo Sapiens
caatttacatactctgctt

SEQ ID NO: 2136 - DNA, 19 bp, Homo Sapiens
aatttacatactctgctta

SEQ ID NO: 2137 - DNA, 19 bp, Homo Sapiens
atttacatactctgcttag

SEQ ID NO: 2138 - DNA, 19 bp, Homo Sapiens
tttacatactctgcttaga

SEQ ID NO: 2139 - DNA, 19 bp, Homo Sapiens
ttacatactctgcttagaa

SEQ ID NO: 2140 - DNA, 19 bp, Homo Sapiens
tacatactctgcttagaat

SEQ ID NO: 2141 - DNA, 19 bp, Homo Sapiens
acatactctgcttagaatt

SEQ ID NO: 2142 - DNA, 19 bp, Homo Sapiens
catactctgcttagaattt

SEQ ID NO: 2143 - DNA, 19 bp, Homo Sapiens
atactctgcttagaatttg

SEQ ID NO: 2144 - DNA, 19 bp, Homo Sapiens
tactctgcttagaatttgg

SEQ ID NO: 2145 - DNA, 19 bp, Homo Sapiens
actctgcttagaatttggg

SEQ ID NO: 2146 - DNA, 19 bp, Homo Sapiens
tagaaatataattgacagg

SEQ ID NO: 2147 - DNA, 19 bp, Homo Sapiens
agaaatataattgacagga

SEQ ID NO: 2148 - DNA, 19 bp, Homo Sapiens
gaaatataattgacaggat

SEQ ID NO: 2149 - DNA, 19 bp, Homo Sapiens
ataattgacaggattattg

SEQ ID NO: 2150 - DNA, 19 bp, Homo Sapiens
taattgacaggattattgg

SEQ ID NO: 2151 - DNA, 19 bp, Homo Sapiens
aattgacaggattattgga

SEQ ID NO: 2152 - DNA, 19 bp, Homo Sapiens
attgacaggattattggaa

SEQ ID NO: 2153 - DNA, 19 bp, Homo Sapiens
ttgacaggattattggaaa

SEQ ID NO: 2154 - DNA, 19 bp, Homo Sapiens
tgacaggattattggaaat

SEQ ID NO: 2155 - DNA, 19 bp, Homo Sapiens
gacaggattattggaaatt

SEQ ID NO: 2156 - DNA, 19 bp, Homo Sapiens
acaggattattggaaattt

SEQ ID NO: 2157 - DNA, 19 bp, Homo Sapiens
caggattattggaaatttg

SEQ ID NO: 2158 - DNA, 19 bp, Homo Sapiens
aggattattggaaatttgt

SEQ ID NO: 2159 - DNA, 19 bp, Homo Sapiens
ggattattggaaatttgtt

SEQ ID NO: 2160 - DNA, 19 bp, Homo Sapiens
tacatttgataaagtaagg

SEQ ID NO: 2161 - DNA, 19 bp, Homo Sapiens
acatttgataaagtaaggc

SEQ ID NO: 2162 - DNA, 19 bp, Homo Sapiens
catttgataaagtaaggca

SEQ ID NO: 2163 - DNA, 19 bp, Homo Sapiens
atttgataaagtaaggcat

SEQ ID NO: 2164 - DNA, 19 bp, Homo Sapiens
tttgataaagtaaggcatg

SEQ ID NO: 2165 - DNA, 19 bp, Homo Sapiens
ttgataaagtaaggcatgg

SEQ ID NO: 2166 - DNA, 19 bp, Homo Sapiens
tgataaagtaaggcatggt

SEQ ID NO: 2167 - DNA, 19 bp, Homo Sapiens
gataaagtaaggcatggtt

SEQ ID NO: 2168 - DNA, 19 bp, Homo Sapiens
ataaagtaaggcatggttg

SEQ ID NO: 2169 - DNA, 19 bp, Homo Sapiens
taaagtaaggcatggttgt

SEQ ID NO: 2170 - DNA, 19 bp, Homo Sapiens
aaagtaaggcatggttgtg

SEQ ID NO: 2171 - DNA, 19 bp, Homo Sapiens
aagtaaggcatggttgtgg

SEQ ID NO: 2172 - DNA, 19 bp, Homo Sapiens
agtaaggcatggttgtggt

SEQ ID NO: 2173 - DNA, 19 bp, Homo Sapiens
gtaaggcatggttgtggtt

SEQ ID NO: 2174 - DNA, 19 bp, Homo Sapiens
taaggcatggttgtggtta

SEQ ID NO: 2175 - DNA, 19 bp, Homo Sapiens
aaggcatggttgtggttaa

SEQ ID NO: 2176 - DNA, 19 bp, Homo Sapiens
aggcatggttgtggttaat

SEQ ID NO: 2177 - DNA, 19 bp, Homo Sapiens
ggcatggttgtggttaatc

SEQ ID NO: 2178 - DNA, 19 bp, Homo Sapiens
gcatggttgtggttaatct

SEQ ID NO: 2179 - DNA, 19 bp, Homo Sapiens
catggttgtggttaatctg

SEQ ID NO: 2180 - DNA, 19 bp, Homo Sapiens
atggttgtggttaatctgg

SEQ ID NO: 2181 - DNA, 19 bp, Homo Sapiens
tggttgtggttaatctggt

SEQ ID NO: 2182 - DNA, 19 bp, Homo Sapiens
ggttgtggttaatctggtt

SEQ ID NO: 2183 - DNA, 19 bp, Homo Sapiens
gttgtggttaatctggttt

SEQ ID NO: 2184 - DNA, 19 bp, Homo Sapiens
ttgtggttaatctggttta

SEQ ID NO: 2185 - DNA, 19 bp, Homo Sapiens
tgtggttaatctggtttat

SEQ ID NO: 2186 - DNA, 19 bp, Homo Sapiens
gtggttaatctggtttatt

SEQ ID NO: 2187 - DNA, 19 bp, Homo Sapiens
tggttaatctggtttattt

SEQ ID NO: 2188 - DNA, 19 bp, Homo Sapiens
tttgttccacaagttaaat

SEQ ID NO: 2189 - DNA, 19 bp, Homo Sapiens
ttgttccacaagttaaata

SEQ ID NO: 2190 - DNA, 19 bp, Homo Sapiens
tgttccacaagttaaataa

SEQ ID NO: 2191 - DNA, 19 bp, Homo Sapiens
gttccacaagttaaataaa

SEQ ID NO: 2192 - DNA, 19 bp, Homo Sapiens
tccacaagttaaataaatc

SEQ ID NO: 2193 - DNA, 19 bp, Homo Sapiens
ccacaagttaaataaatca

SEQ ID NO: 2194 - DNA, 20 bp, Homo Sapiens
attcctgaagctgacagcat

SEQ ID NO: 2195 - DNA, 20 bp, Homo Sapiens
ttcctgaagctgacagcatt

SEQ ID NO: 2196 - DNA, 20 bp, Homo Sapiens
tcctgaagctgacagcattc

SEQ ID NO: 2197 - DNA, 20 bp, Homo Sapiens
cctgaagctgacagcattcg

SEQ ID NO: 2198 - DNA, 20 bp, Homo Sapiens
ctgaagctgacagcattcgg

SEQ ID NO: 2199 - DNA, 20 bp, Homo Sapiens
tgaagctgacagcattcggg

SEQ ID NO: 2200 - DNA, 20 bp, Homo Sapiens
ttagctgtgctcgcgctact

SEQ ID NO: 2201 - DNA, 20 bp, Homo Sapiens
tgctcgcgctactctctctt

SEQ ID NO: 2202 - DNA, 20 bp, Homo Sapiens
gctcgcgctactctctcttt

SEQ ID NO: 2203 - DNA, 20 bp, Homo Sapiens
ctcgcgctactctctctttc

SEQ ID NO: 2204 - DNA, 20 bp, Homo Sapiens
tcgcgctactctctctttct

SEQ ID NO: 2205 - DNA, 20 bp, Homo Sapiens
cgcgctactctctctttctg

SEQ ID NO: 2206 - DNA, 20 bp, Homo Sapiens
gcgctactctctctttctgg

SEQ ID NO: 2207 - DNA, 20 bp, Homo Sapiens
cgctactctctctttctggc

SEQ ID NO: 2208 - DNA, 20 bp, Homo Sapiens
gctactctctctttctggcc

SEQ ID NO: 2209 - DNA, 20 bp, Homo Sapiens
ctactctctctttctggcct

SEQ ID NO: 2210 - DNA, 20 bp, Homo Sapiens
tactctctctttctggcctg

SEQ ID NO: 2211 - DNA, 20 bp, Homo Sapiens
actctctctttctggcctgg

SEQ ID NO: 2212 - DNA, 20 bp, Homo Sapiens
ctctctctttctggcctgga

SEQ ID NO: 2213 - DNA, 20 bp, Homo Sapiens
tctctctttctggcctggag

SEQ ID NO: 2214 - DNA, 20 bp, Homo Sapiens
tctttctggcctggaggcta

SEQ ID NO: 2215 - DNA, 20 bp, Homo Sapiens
ctttctggcctggaggctat

SEQ ID NO: 2216 - DNA, 20 bp, Homo Sapiens
tttctggcctggaggctatc

SEQ ID NO: 2217 - DNA, 20 bp, Homo Sapiens
tggaggctatccagcgtact

SEQ ID NO: 2218 - DNA, 20 bp, Homo Sapiens
aggctatccagcgtactcca

SEQ ID NO: 2219 - DNA, 20 bp, Homo Sapiens
ggctatccagcgtactccaa

SEQ ID NO: 2220 - DNA, 20 bp, Homo Sapiens
gctatccagcgtactccaaa

SEQ ID NO: 2221 - DNA, 20 bp, Homo Sapiens
ctatccagcgtactccaaag

SEQ ID NO: 2222 - DNA, 20 bp, Homo Sapiens
tatccagcgtactccaaaga

SEQ ID NO: 2223 - DNA, 20 bp, Homo Sapiens
atccagcgtactccaaagat

SEQ ID NO: 2224 - DNA, 20 bp, Homo Sapiens
tccagcgtactccaaagatt

SEQ ID NO: 2225 - DNA, 20 bp, Homo Sapiens
ccagcgtactccaaagattc

SEQ ID NO: 2226 - DNA, 20 bp, Homo Sapiens
cagcgtactccaaagattca

SEQ ID NO: 2227 - DNA, 20 bp, Homo Sapiens
agcgtactccaaagattcag

SEQ ID NO: 2228 - DNA, 20 bp, Homo Sapiens
gcgtactccaaagattcagg

SEQ ID NO: 2229 - DNA, 20 bp, Homo Sapiens
cgtactccaaagattcaggt

SEQ ID NO: 2230 - DNA, 20 bp, Homo Sapiens
gtactccaaagattcaggtt

SEQ ID NO: 2231 - DNA, 20 bp, Homo Sapiens
tactccaaagattcaggttt

SEQ ID NO: 2232 - DNA, 20 bp, Homo Sapiens
actccaaagattcaggttta

SEQ ID NO: 2233 - DNA, 20 bp, Homo Sapiens
ctccaaagattcaggtttac

SEQ ID NO: 2234 - DNA, 20 bp, Homo Sapiens
tccaaagattcaggtttact

SEQ ID NO: 2235 - DNA, 20 bp, Homo Sapiens
ccaaagattcaggtttactc

SEQ ID NO: 2236 - DNA, 20 bp, Homo Sapiens
caaagattcaggtttactca

SEQ ID NO: 2237 - DNA, 20 bp, Homo Sapiens
aaagattcaggtttactcac

SEQ ID NO: 2238 - DNA, 20 bp, Homo Sapiens
aagattcaggtttactcacg

SEQ ID NO: 2239 - DNA, 20 bp, Homo Sapiens
agattcaggtttactcacgt

SEQ ID NO: 2240 - DNA, 20 bp, Homo Sapiens
gattcaggtttactcacgtc

SEQ ID NO: 2241 - DNA, 20 bp, Homo Sapiens
attcaggtttactcacgtca

SEQ ID NO: 2242 - DNA, 20 bp, Homo Sapiens
ttcaggtttactcacgtcat

SEQ ID NO: 2243 - DNA, 20 bp, Homo Sapiens
tcaggtttactcacgtcatc

SEQ ID NO: 2244 - DNA, 20 bp, Homo Sapiens
caggtttactcacgtcatcc

SEQ ID NO: 2245 - DNA, 20 bp, Homo Sapiens
aggtttactcacgtcatcca

SEQ ID NO: 2246 - DNA, 20 bp, Homo Sapiens
ggtttactcacgtcatccag

SEQ ID NO: 2247 - DNA, 20 bp, Homo Sapiens
gtttactcacgtcatccagc

SEQ ID NO: 2248 - DNA, 20 bp, Homo Sapiens
tttactcacgtcatccagca

SEQ ID NO: 2249 - DNA, 20 bp, Homo Sapiens
ttactcacgtcatccagcag

SEQ ID NO: 2250 - DNA, 20 bp, Homo Sapiens
tactcacgtcatccagcaga

SEQ ID NO: 2251 - DNA, 20 bp, Homo Sapiens
actcacgtcatccagcagag

SEQ ID NO: 2252 - DNA, 20 bp, Homo Sapiens
ctcacgtcatccagcagaga

SEQ ID NO: 2253 - DNA, 20 bp, Homo Sapiens
tcacgtcatccagcagagaa

SEQ ID NO: 2254 - DNA, 20 bp, Homo Sapiens
cacgtcatccagcagagaat

SEQ ID NO: 2255 - DNA, 20 bp, Homo Sapiens
acgtcatccagcagagaatg

SEQ ID NO: 2256 - DNA, 20 bp, Homo Sapiens
cgtcatccagcagagaatgg

SEQ ID NO: 2257 - DNA, 20 bp, Homo Sapiens
gtcatccagcagagaatgga

SEQ ID NO: 2258 - DNA, 20 bp, Homo Sapiens
tcatccagcagagaatggaa

SEQ ID NO: 2259 - DNA, 20 bp, Homo Sapiens
catccagcagagaatggaaa

SEQ ID NO: 2260 - DNA, 20 bp, Homo Sapiens
atccagcagagaatggaaag

SEQ ID NO: 2261 - DNA, 20 bp, Homo Sapiens
tccagcagagaatggaaagt

SEQ ID NO: 2262 - DNA, 20 bp, Homo Sapiens
ccagcagagaatggaaagtc

SEQ ID NO: 2263 - DNA, 20 bp, Homo Sapiens
cagcagagaatggaaagtca

SEQ ID NO: 2264 - DNA, 20 bp, Homo Sapiens
agcagagaatggaaagtcaa

SEQ ID NO: 2265 - DNA, 20 bp, Homo Sapiens
gcagagaatggaaagtcaaa

SEQ ID NO: 2266 - DNA, 20 bp, Homo Sapiens
cagagaatggaaagtcaaat

SEQ ID NO: 2267 - DNA, 20 bp, Homo Sapiens
agagaatggaaagtcaaatt

SEQ ID NO: 2268 - DNA, 20 bp, Homo Sapiens
gagaatggaaagtcaaattt

SEQ ID NO: 2269 - DNA, 20 bp, Homo Sapiens
agaatggaaagtcaaatttc

SEQ ID NO: 2270 - DNA, 20 bp, Homo Sapiens
gaatggaaagtcaaatttcc

SEQ ID NO: 2271 - DNA, 20 bp, Homo Sapiens
aatggaaagtcaaatttcct

SEQ ID NO: 2272 - DNA, 20 bp, Homo Sapiens
atggaaagtcaaatttcctg

SEQ ID NO: 2273 - DNA, 20 bp, Homo Sapiens
tggaaagtcaaatttcctga

SEQ ID NO: 2274 - DNA, 20 bp, Homo Sapiens
ggaaagtcaaatttcctgaa

SEQ ID NO: 2275 - DNA, 20 bp, Homo Sapiens
gaaagtcaaatttcctgaat

SEQ ID NO: 2276 - DNA, 20 bp, Homo Sapiens
aaagtcaaatttcctgaatt

SEQ ID NO: 2277 - DNA, 20 bp, Homo Sapiens
aagtcaaatttcctgaattg

SEQ ID NO: 2278 - DNA, 20 bp, Homo Sapiens
agtcaaatttcctgaattgc

SEQ ID NO: 2279 - DNA, 20 bp, Homo Sapiens
gtcaaatttcctgaattgct

SEQ ID NO: 2280 - DNA, 20 bp, Homo Sapiens
tcaaatttcctgaattgcta

SEQ ID NO: 2281 - DNA, 20 bp, Homo Sapiens
caaatttcctgaattgctat

SEQ ID NO: 2282 - DNA, 20 bp, Homo Sapiens
aaatttcctgaattgctatg

SEQ ID NO: 2283 - DNA, 20 bp, Homo Sapiens
aatttcctgaattgctatgt

SEQ ID NO: 2284 - DNA, 20 bp, Homo Sapiens
atttcctgaattgctatgtg

SEQ ID NO: 2285 - DNA, 20 bp, Homo Sapiens
tttcctgaattgctatgtgt

SEQ ID NO: 2286 - DNA, 20 bp, Homo Sapiens
ttcctgaattgctatgtgtc

SEQ ID NO: 2287 - DNA, 20 bp, Homo Sapiens
tcctgaattgctatgtgtct

SEQ ID NO: 2288 - DNA, 20 bp, Homo Sapiens
cctgaattgctatgtgtctg

SEQ ID NO: 2289 - DNA, 20 bp, Homo Sapiens
ctgaattgctatgtgtctgg

SEQ ID NO: 2290 - DNA, 20 bp, Homo Sapiens
tgaattgctatgtgtctggg

SEQ ID NO: 2291 - DNA, 20 bp, Homo Sapiens
gaattgctatgtgtctgggt

SEQ ID NO: 2292 - DNA, 20 bp, Homo Sapiens
aattgctatgtgtctgggtt

SEQ ID NO: 2293 - DNA, 20 bp, Homo Sapiens
attgctatgtgtctgggttt

SEQ ID NO: 2294 - DNA, 20 bp, Homo Sapiens
ttgctatgtgtctgggtttc

SEQ ID NO: 2295 - DNA, 20 bp, Homo Sapiens
tgctatgtgtctgggtttca

SEQ ID NO: 2296 - DNA, 20 bp, Homo Sapiens
gctatgtgtctgggtttcat

SEQ ID NO: 2297 - DNA, 20 bp, Homo Sapiens
ctatgtgtctgggtttcatc

SEQ ID NO: 2298 - DNA, 20 bp, Homo Sapiens
tatgtgtctgggtttcatcc

SEQ ID NO: 2299 - DNA, 20 bp, Homo Sapiens
atgtgtctgggtttcatcca

SEQ ID NO: 2300 - DNA, 20 bp, Homo Sapiens
tgtgtctgggtttcatccat

SEQ ID NO: 2301 - DNA, 20 bp, Homo Sapiens
gtgtctgggtttcatccatc

SEQ ID NO: 2302 - DNA, 20 bp, Homo Sapiens
tgtctgggtttcatccatcc

SEQ ID NO: 2303 - DNA, 20 bp, Homo Sapiens
gtctgggtttcatccatccg

SEQ ID NO: 2304 - DNA, 20 bp, Homo Sapiens
tctgggtttcatccatccga

SEQ ID NO: 2305 - DNA, 20 bp, Homo Sapiens
ctgggtttcatccatccgac

SEQ ID NO: 2306 - DNA, 20 bp, Homo Sapiens
tgggtttcatccatccgaca

SEQ ID NO: 2307 - DNA, 20 bp, Homo Sapiens
gggtttcatccatccgacat

SEQ ID NO: 2308 - DNA, 20 bp, Homo Sapiens
ggtttcatccatccgacatt

SEQ ID NO: 2309 - DNA, 20 bp, Homo Sapiens
gtttcatccatccgacattg

SEQ ID NO: 2310 - DNA, 20 bp, Homo Sapiens
tttcatccatccgacattga

SEQ ID NO: 2311 - DNA, 20 bp, Homo Sapiens
ttcatccatccgacattgaa

SEQ ID NO: 2312 - DNA, 20 bp, Homo Sapiens
tcatccatccgacattgaag

SEQ ID NO: 2313 - DNA, 20 bp, Homo Sapiens
catccatccgacattgaagt

SEQ ID NO: 2314 - DNA, 20 bp, Homo Sapiens
atccatccgacattgaagtt

SEQ ID NO: 2315 - DNA, 20 bp, Homo Sapiens
tccatccgacattgaagttg

SEQ ID NO: 2316 - DNA, 20 bp, Homo Sapiens
ccatccgacattgaagttga

SEQ ID NO: 2317 - DNA, 20 bp, Homo Sapiens
catccgacattgaagttgac

SEQ ID NO: 2318 - DNA, 20 bp, Homo Sapiens
atccgacattgaagttgact

SEQ ID NO: 2319 - DNA, 20 bp, Homo Sapiens
tccgacattgaagttgactt

SEQ ID NO: 2320 - DNA, 20 bp, Homo Sapiens
ccgacattgaagttgactta

SEQ ID NO: 2321 - DNA, 20 bp, Homo Sapiens
cgacattgaagttgacttac

SEQ ID NO: 2322 - DNA, 20 bp, Homo Sapiens
gacattgaagttgacttact

SEQ ID NO: 2323 - DNA, 20 bp, Homo Sapiens
acattgaagttgacttactg

SEQ ID NO: 2324 - DNA, 20 bp, Homo Sapiens
cattgaagttgacttactga

SEQ ID NO: 2325 - DNA, 20 bp, Homo Sapiens
attgaagttgacttactgaa

SEQ ID NO: 2326 - DNA, 20 bp, Homo Sapiens
ttgaagttgacttactgaag

SEQ ID NO: 2327 - DNA, 20 bp, Homo Sapiens
tgaagttgacttactgaaga

SEQ ID NO: 2328 - DNA, 20 bp, Homo Sapiens
gaagttgacttactgaagaa

SEQ ID NO: 2329 - DNA, 20 bp, Homo Sapiens
aagttgacttactgaagaat

SEQ ID NO: 2330 - DNA, 20 bp, Homo Sapiens
agttgacttactgaagaatg

SEQ ID NO: 2331 - DNA, 20 bp, Homo Sapiens
gttgacttactgaagaatgg

SEQ ID NO: 2332 - DNA, 20 bp, Homo Sapiens
ttgacttactgaagaatgga

SEQ ID NO: 2333 - DNA, 20 bp, Homo Sapiens
tgacttactgaagaatggag

SEQ ID NO: 2334 - DNA, 20 bp, Homo Sapiens
gacttactgaagaatggaga

SEQ ID NO: 2335 - DNA, 20 bp, Homo Sapiens
acttactgaagaatggagag

SEQ ID NO: 2336 - DNA, 20 bp, Homo Sapiens
cttactgaagaatggagaga

SEQ ID NO: 2337 - DNA, 20 bp, Homo Sapiens
ttactgaagaatggagagag

SEQ ID NO: 2338 - DNA, 20 bp, Homo Sapiens
tactgaagaatggagagaga

SEQ ID NO: 2339 - DNA, 20 bp, Homo Sapiens
actgaagaatggagagagaa

SEQ ID NO: 2340 - DNA, 20 bp, Homo Sapiens
ctgaagaatggagagagaat

SEQ ID NO: 2341 - DNA, 20 bp, Homo Sapiens
tgaagaatggagagagaatt

SEQ ID NO: 2342 - DNA, 20 bp, Homo Sapiens
gaagaatggagagagaattg

SEQ ID NO: 2343 - DNA, 20 bp, Homo Sapiens
aagaatggagagagaattga

SEQ ID NO: 2344 - DNA, 20 bp, Homo Sapiens
agaatggagagagaattgaa

SEQ ID NO: 2345 - DNA, 20 bp, Homo Sapiens
gaatggagagagaattgaaa

SEQ ID NO: 2346 - DNA, 20 bp, Homo Sapiens
aaagtggagcattcagactt

SEQ ID NO: 2347 - DNA, 20 bp, Homo Sapiens
aagtggagcattcagacttg

SEQ ID NO: 2348 - DNA, 20 bp, Homo Sapiens
agtggagcattcagacttgt

SEQ ID NO: 2349 - DNA, 20 bp, Homo Sapiens
gtggagcattcagacttgtc

SEQ ID NO: 2350 - DNA, 20 bp, Homo Sapiens
tggagcattcagacttgtct

SEQ ID NO: 2351 - DNA, 20 bp, Homo Sapiens
ggagcattcagacttgtctt

SEQ ID NO: 2352 - DNA, 20 bp, Homo Sapiens
gagcattcagacttgtcttt

SEQ ID NO: 2353 - DNA, 20 bp, Homo Sapiens
agcattcagacttgtctttc

SEQ ID NO: 2354 - DNA, 20 bp, Homo Sapiens
gcattcagacttgtctttca

SEQ ID NO: 2355 - DNA, 20 bp, Homo Sapiens
cattcagacttgtctttcag

SEQ ID NO: 2356 - DNA, 20 bp, Homo Sapiens
attcagacttgtctttcagc

SEQ ID NO: 2357 - DNA, 20 bp, Homo Sapiens
ttcagacttgtctttcagca

SEQ ID NO: 2358 - DNA, 20 bp, Homo Sapiens
tcagacttgtctttcagcaa

SEQ ID NO: 2359 - DNA, 20 bp, Homo Sapiens
cagacttgtctttcagcaag

SEQ ID NO: 2360 - DNA, 20 bp, Homo Sapiens
agacttgtctttcagcaagg

SEQ ID NO: 2361 - DNA, 20 bp, Homo Sapiens
gacttgtctttcagcaagga

SEQ ID NO: 2362 - DNA, 20 bp, Homo Sapiens
acttgtctttcagcaaggac

SEQ ID NO: 2363 - DNA, 20 bp, Homo Sapiens
cttgtctttcagcaaggact

SEQ ID NO: 2364 - DNA, 20 bp, Homo Sapiens
ttgtctttcagcaaggactg

SEQ ID NO: 2365 - DNA, 20 bp, Homo Sapiens
tgtctttcagcaaggactgg

SEQ ID NO: 2366 - DNA, 20 bp, Homo Sapiens
gtctttcagcaaggactggt

SEQ ID NO: 2367 - DNA, 20 bp, Homo Sapiens
tctttcagcaaggactggtc

SEQ ID NO: 2368 - DNA, 20 bp, Homo Sapiens
ctttcagcaaggactggtct

SEQ ID NO: 2369 - DNA, 20 bp, Homo Sapiens
tttcagcaaggactggtctt

SEQ ID NO: 2370 - DNA, 20 bp, Homo Sapiens
ttcagcaaggactggtcttt

SEQ ID NO: 2371 - DNA, 20 bp, Homo Sapiens
tcagcaaggactggtctttc

SEQ ID NO: 2372 - DNA, 20 bp, Homo Sapiens
cagcaaggactggtctttct

SEQ ID NO: 2373 - DNA, 20 bp, Homo Sapiens
agcaaggactggtctttcta

SEQ ID NO: 2374 - DNA, 20 bp, Homo Sapiens
gcaaggactggtctttctat

SEQ ID NO: 2375 - DNA, 20 bp, Homo Sapiens
caaggactggtctttctatc

SEQ ID NO: 2376 - DNA, 20 bp, Homo Sapiens
aaggactggtctttctatct

SEQ ID NO: 2377 - DNA, 20 bp, Homo Sapiens
aggactggtctttctatctc

SEQ ID NO: 2378 - DNA, 20 bp, Homo Sapiens
ggactggtctttctatctct

SEQ ID NO: 2379 - DNA, 20 bp, Homo Sapiens
gactggtctttctatctctt

SEQ ID NO: 2380 - DNA, 20 bp, Homo Sapiens
actggtctttctatctcttg

SEQ ID NO: 2381 - DNA, 20 bp, Homo Sapiens
ctggtctttctatctcttgt

SEQ ID NO: 2382 - DNA, 20 bp, Homo Sapiens
tggtctttctatctcttgta

SEQ ID NO: 2383 - DNA, 20 bp, Homo Sapiens
ggtctttctatctcttgtac

SEQ ID NO: 2384 - DNA, 20 bp, Homo Sapiens
gtctttctatctcttgtact

SEQ ID NO: 2385 - DNA, 20 bp, Homo Sapiens
tctttctatctcttgtacta

SEQ ID NO: 2386 - DNA, 20 bp, Homo Sapiens
ctttctatctcttgtactac

SEQ ID NO: 2387 - DNA, 20 bp, Homo Sapiens
tttctatctcttgtactaca

SEQ ID NO: 2388 - DNA, 20 bp, Homo Sapiens
ttctatctcttgtactacac

SEQ ID NO: 2389 - DNA, 20 bp, Homo Sapiens
tctatctcttgtactacact

SEQ ID NO: 2390 - DNA, 20 bp, Homo Sapiens
ctatctcttgtactacactg

SEQ ID NO: 2391 - DNA, 20 bp, Homo Sapiens
tatctcttgtactacactga

SEQ ID NO: 2392 - DNA, 20 bp, Homo Sapiens
atctcttgtactacactgaa

SEQ ID NO: 2393 - DNA, 20 bp, Homo Sapiens
tctcttgtactacactgaat

SEQ ID NO: 2394 - DNA, 20 bp, Homo Sapiens
ctcttgtactacactgaatt

SEQ ID NO: 2395 - DNA, 20 bp, Homo Sapiens
tcttgtactacactgaattc

SEQ ID NO: 2396 - DNA, 20 bp, Homo Sapiens
cttgtactacactgaattca

SEQ ID NO: 2397 - DNA, 20 bp, Homo Sapiens
ttgtactacactgaattcac

SEQ ID NO: 2398 - DNA, 20 bp, Homo Sapiens
tgtactacactgaattcacc

SEQ ID NO: 2399 - DNA, 20 bp, Homo Sapiens
gtactacactgaattcaccc

SEQ ID NO: 2400 - DNA, 20 bp, Homo Sapiens
aaagatgagtatgcctgccg

SEQ ID NO: 2401 - DNA, 20 bp, Homo Sapiens
aagatgagtatgcctgccgt

SEQ ID NO: 2402 - DNA, 20 bp, Homo Sapiens
agatgagtatgcctgccgtg

SEQ ID NO: 2403 - DNA, 20 bp, Homo Sapiens
gatgagtatgcctgccgtgt

SEQ ID NO: 2404 - DNA, 20 bp, Homo Sapiens
atgagtatgcctgccgtgtg

SEQ ID NO: 2405 - DNA, 20 bp, Homo Sapiens
tgagtatgcctgccgtgtga

SEQ ID NO: 2406 - DNA, 20 bp, Homo Sapiens
gagtatgcctgccgtgtgaa

SEQ ID NO: 2407 - DNA, 20 bp, Homo Sapiens
agtatgcctgccgtgtgaac

SEQ ID NO: 2408 - DNA, 20 bp, Homo Sapiens
tatgcctgccgtgtgaacca

SEQ ID NO: 2409 - DNA, 20 bp, Homo Sapiens
atgcctgccgtgtgaaccat

SEQ ID NO: 2410 - DNA, 20 bp, Homo Sapiens
ctgccgtgtgaaccatgtga

SEQ ID NO: 2411 - DNA, 20 bp, Homo Sapiens
tgccgtgtgaaccatgtgac

SEQ ID NO: 2412 - DNA, 20 bp, Homo Sapiens
gccgtgtgaaccatgtgact

SEQ ID NO: 2413 - DNA, 20 bp, Homo Sapiens
ccgtgtgaaccatgtgactt

SEQ ID NO: 2414 - DNA, 20 bp, Homo Sapiens
cgtgtgaaccatgtgacttt

SEQ ID NO: 2415 - DNA, 20 bp, Homo Sapiens
gtgtgaaccatgtgactttg

SEQ ID NO: 2416 - DNA, 20 bp, Homo Sapiens
tgtgaaccatgtgactttgt

SEQ ID NO: 2417 - DNA, 20 bp, Homo Sapiens
gtgaaccatgtgactttgtc

SEQ ID NO: 2418 - DNA, 20 bp, Homo Sapiens
tgaaccatgtgactttgtca

SEQ ID NO: 2419 - DNA, 20 bp, Homo Sapiens
gaaccatgtgactttgtcac

SEQ ID NO: 2420 - DNA, 20 bp, Homo Sapiens
aaccatgtgactttgtcaca

SEQ ID NO: 2421 - DNA, 20 bp, Homo Sapiens
accatgtgactttgtcacag

SEQ ID NO: 2422 - DNA, 20 bp, Homo Sapiens
ccatgtgactttgtcacagc

SEQ ID NO: 2423 - DNA, 20 bp, Homo Sapiens
catgtgactttgtcacagcc

SEQ ID NO: 2424 - DNA, 20 bp, Homo Sapiens
atgtgactttgtcacagccc

SEQ ID NO: 2425 - DNA, 20 bp, Homo Sapiens
tgtgactttgtcacagccca

SEQ ID NO: 2426 - DNA, 20 bp, Homo Sapiens
gtgactttgtcacagcccaa

SEQ ID NO: 2427 - DNA, 20 bp, Homo Sapiens
tgactttgtcacagcccaag

SEQ ID NO: 2428 - DNA, 20 bp, Homo Sapiens
gactttgtcacagcccaaga

SEQ ID NO: 2429 - DNA, 20 bp, Homo Sapiens
actttgtcacagcccaagat

SEQ ID NO: 2430 - DNA, 20 bp, Homo Sapiens
ctttgtcacagcccaagata

SEQ ID NO: 2431 - DNA, 20 bp, Homo Sapiens
tttgtcacagcccaagatag

SEQ ID NO: 2432 - DNA, 20 bp, Homo Sapiens
ttgtcacagcccaagatagt

SEQ ID NO: 2433 - DNA, 20 bp, Homo Sapiens
tgtcacagcccaagatagtt

SEQ ID NO: 2434 - DNA, 20 bp, Homo Sapiens
gtcacagcccaagatagtta

SEQ ID NO: 2435 - DNA, 20 bp, Homo Sapiens
tcacagcccaagatagttaa

SEQ ID NO: 2436 - DNA, 20 bp, Homo Sapiens
cacagcccaagatagttaag

SEQ ID NO: 2437 - DNA, 20 bp, Homo Sapiens
acagcccaagatagttaagt

SEQ ID NO: 2438 - DNA, 20 bp, Homo Sapiens
cagcccaagatagttaagtg

SEQ ID NO: 2439 - DNA, 20 bp, Homo Sapiens
agcccaagatagttaagtgg

SEQ ID NO: 2440 - DNA, 20 bp, Homo Sapiens
gcccaagatagttaagtggg

SEQ ID NO: 2441 - DNA, 20 bp, Homo Sapiens
cccaagatagttaagtggga

SEQ ID NO: 2442 - DNA, 20 bp, Homo Sapiens
ccaagatagttaagtgggat

SEQ ID NO: 2443 - DNA, 20 bp, Homo Sapiens
caagatagttaagtgggatc

SEQ ID NO: 2444 - DNA, 20 bp, Homo Sapiens
aagatagttaagtgggatcg

SEQ ID NO: 2445 - DNA, 20 bp, Homo Sapiens
agatagttaagtgggatcga

SEQ ID NO: 2446 - DNA, 20 bp, Homo Sapiens
gatagttaagtgggatcgag

SEQ ID NO: 2447 - DNA, 20 bp, Homo Sapiens
atagttaagtgggatcgaga

SEQ ID NO: 2448 - DNA, 20 bp, Homo Sapiens
tagttaagtgggatcgagac

SEQ ID NO: 2449 - DNA, 20 bp, Homo Sapiens
agttaagtgggatcgagaca

SEQ ID NO: 2450 - DNA, 20 bp, Homo Sapiens
gttaagtgggatcgagacat

SEQ ID NO: 2451 - DNA, 20 bp, Homo Sapiens
ttaagtgggatcgagacatg

SEQ ID NO: 2452 - DNA, 20 bp, Homo Sapiens
taagtgggatcgagacatgt

SEQ ID NO: 2453 - DNA, 20 bp, Homo Sapiens
aagtgggatcgagacatgta

SEQ ID NO: 2454 - DNA, 20 bp, Homo Sapiens
agtgggatcgagacatgtaa

SEQ ID NO: 2455 - DNA, 20 bp, Homo Sapiens
gtgggatcgagacatgtaag

SEQ ID NO: 2456 - DNA, 20 bp, Homo Sapiens
tgggatcgagacatgtaagc

SEQ ID NO: 2457 - DNA, 20 bp, Homo Sapiens
gggatcgagacatgtaagca

SEQ ID NO: 2458 - DNA, 20 bp, Homo Sapiens
ggatcgagacatgtaagcag

SEQ ID NO: 2459 - DNA, 20 bp, Homo Sapiens
gatcgagacatgtaagcagc

SEQ ID NO: 2460 - DNA, 20 bp, Homo Sapiens
atcgagacatgtaagcagca

SEQ ID NO: 2461 - DNA, 20 bp, Homo Sapiens
tcgagacatgtaagcagcat

SEQ ID NO: 2462 - DNA, 20 bp, Homo Sapiens
cgagacatgtaagcagcatc

SEQ ID NO: 2463 - DNA, 20 bp, Homo Sapiens
gagacatgtaagcagcatca

SEQ ID NO: 2464 - DNA, 20 bp, Homo Sapiens
agacatgtaagcagcatcat

SEQ ID NO: 2465 - DNA, 20 bp, Homo Sapiens
gacatgtaagcagcatcatg

SEQ ID NO: 2466 - DNA, 20 bp, Homo Sapiens
acatgtaagcagcatcatgg

SEQ ID NO: 2467 - DNA, 20 bp, Homo Sapiens
catgtaagcagcatcatgga

SEQ ID NO: 2468 - DNA, 20 bp, Homo Sapiens
atgtaagcagcatcatggag

SEQ ID NO: 2469 - DNA, 20 bp, Homo Sapiens
tgtaagcagcatcatggagg

SEQ ID NO: 2470 - DNA, 20 bp, Homo Sapiens
gtaagcagcatcatggaggt

SEQ ID NO: 2471 - DNA, 20 bp, Homo Sapiens
taagcagcatcatggaggtt

SEQ ID NO: 2472 - DNA, 20 bp, Homo Sapiens
aagcagcatcatggaggttt

SEQ ID NO: 2473 - DNA, 20 bp, Homo Sapiens
agcagcatcatggaggtttg

SEQ ID NO: 2474 - DNA, 20 bp, Homo Sapiens
gcagcatcatggaggtttga

SEQ ID NO: 2475 - DNA, 20 bp, Homo Sapiens
cagcatcatggaggtttgaa

SEQ ID NO: 2476 - DNA, 20 bp, Homo Sapiens
agcatcatggaggtttgaag

SEQ ID NO: 2477 - DNA, 20 bp, Homo Sapiens
gcatcatggaggtttgaaga

SEQ ID NO: 2478 - DNA, 20 bp, Homo Sapiens
catcatggaggtttgaagat

SEQ ID NO: 2479 - DNA, 20 bp, Homo Sapiens
atcatggaggtttgaagatg

SEQ ID NO: 2480 - DNA, 20 bp, Homo Sapiens
tcatggaggtttgaagatgc

SEQ ID NO: 2481 - DNA, 20 bp, Homo Sapiens
catggaggtttgaagatgcc

SEQ ID NO: 2482 - DNA, 20 bp, Homo Sapiens
atggaggtttgaagatgccg

SEQ ID NO: 2483 - DNA, 20 bp, Homo Sapiens
tggaggtttgaagatgccgc

SEQ ID NO: 2484 - DNA, 20 bp, Homo Sapiens
ggaggtttgaagatgccgca

SEQ ID NO: 2485 - DNA, 20 bp, Homo Sapiens
gaggtttgaagatgccgcat

SEQ ID NO: 2486 - DNA, 20 bp, Homo Sapiens
aggtttgaagatgccgcatt

SEQ ID NO: 2487 - DNA, 20 bp, Homo Sapiens
ggtttgaagatgccgcattt

SEQ ID NO: 2488 - DNA, 20 bp, Homo Sapiens
gtttgaagatgccgcatttg

SEQ ID NO: 2489 - DNA, 20 bp, Homo Sapiens
tttgaagatgccgcatttgg

SEQ ID NO: 2490 - DNA, 20 bp, Homo Sapiens
ttgaagatgccgcatttgga

SEQ ID NO: 2491 - DNA, 20 bp, Homo Sapiens
tgaagatgccgcatttggat

SEQ ID NO: 2492 - DNA, 20 bp, Homo Sapiens
gaagatgccgcatttggatt

SEQ ID NO: 2493 - DNA, 20 bp, Homo Sapiens
aagatgccgcatttggattg

SEQ ID NO: 2494 - DNA, 20 bp, Homo Sapiens
agatgccgcatttggattgg

SEQ ID NO: 2495 - DNA, 20 bp, Homo Sapiens
gatgccgcatttggattgga

SEQ ID NO: 2496 - DNA, 20 bp, Homo Sapiens
atgccgcatttggattggat

SEQ ID NO: 2497 - DNA, 20 bp, Homo Sapiens
tgccgcatttggattggatg

SEQ ID NO: 2498 - DNA, 20 bp, Homo Sapiens
gccgcatttggattggatga

SEQ ID NO: 2499 - DNA, 20 bp, Homo Sapiens
ccgcatttggattggatgaa

SEQ ID NO: 2500 - DNA, 20 bp, Homo Sapiens
cgcatttggattggatgaat

SEQ ID NO: 2501 - DNA, 20 bp, Homo Sapiens
gcatttggattggatgaatt

SEQ ID NO: 2502 - DNA, 20 bp, Homo Sapiens
catttggattggatgaattc

SEQ ID NO: 2503 - DNA, 20 bp, Homo Sapiens
atttggattggatgaattcc

SEQ ID NO: 2504 - DNA, 20 bp, Homo Sapiens
tttggattggatgaattcca

SEQ ID NO: 2505 - DNA, 20 bp, Homo Sapiens
ttggattggatgaattccaa

SEQ ID NO: 2506 - DNA, 20 bp, Homo Sapiens
tggattggatgaattccaaa

SEQ ID NO: 2507 - DNA, 20 bp, Homo Sapiens
ggattggatgaattccaaat

SEQ ID NO: 2508 - DNA, 20 bp, Homo Sapiens
gattggatgaattccaaatt

SEQ ID NO: 2509 - DNA, 20 bp, Homo Sapiens
attggatgaattccaaattc

SEQ ID NO: 2510 - DNA, 20 bp, Homo Sapiens
ttggatgaattccaaattct

SEQ ID NO: 2511 - DNA, 20 bp, Homo Sapiens
tggatgaattccaaattctg

SEQ ID NO: 2512 - DNA, 20 bp, Homo Sapiens
ggatgaattccaaattctgc

SEQ ID NO: 2513 - DNA, 20 bp, Homo Sapiens
gatgaattccaaattctgct

SEQ ID NO: 2514 - DNA, 20 bp, Homo Sapiens
atgaattccaaattctgctt

SEQ ID NO: 2515 - DNA, 20 bp, Homo Sapiens
tgaattccaaattctgcttg

SEQ ID NO: 2516 - DNA, 20 bp, Homo Sapiens
gaattccaaattctgcttgc

SEQ ID NO: 2517 - DNA, 20 bp, Homo Sapiens
aattccaaattctgcttgct

SEQ ID NO: 2518 - DNA, 20 bp, Homo Sapiens
attccaaattctgcttgctt

SEQ ID NO: 2519 - DNA, 20 bp, Homo Sapiens
ttccaaattctgcttgcttg

SEQ ID NO: 2520 - DNA, 20 bp, Homo Sapiens
tccaaattctgcttgcttgc

SEQ ID NO: 2521 - DNA, 20 bp, Homo Sapiens
ccaaattctgcttgcttgct

SEQ ID NO: 2522 - DNA, 20 bp, Homo Sapiens
caaattctgcttgcttgctt

SEQ ID NO: 2523 - DNA, 20 bp, Homo Sapiens
aaattctgcttgcttgcttt

SEQ ID NO: 2524 - DNA, 20 bp, Homo Sapiens
atattgatatgcttatacac

SEQ ID NO: 2525 - DNA, 20 bp, Homo Sapiens
tattgatatgcttatacact

SEQ ID NO: 2526 - DNA, 20 bp, Homo Sapiens
attgatatgcttatacactt

SEQ ID NO: 2527 - DNA, 20 bp, Homo Sapiens
ttgatatgcttatacactta

SEQ ID NO: 2528 - DNA, 20 bp, Homo Sapiens
tgatatgcttatacacttac

SEQ ID NO: 2529 - DNA, 20 bp, Homo Sapiens
gatatgcttatacacttaca

SEQ ID NO: 2530 - DNA, 20 bp, Homo Sapiens
atatgcttatacacttacac

SEQ ID NO: 2531 - DNA, 20 bp, Homo Sapiens
tatgcttatacacttacact

SEQ ID NO: 2532 - DNA, 20 bp, Homo Sapiens
atgcttatacacttacactt

SEQ ID NO: 2533 - DNA, 20 bp, Homo Sapiens
tgcttatacacttacacttt

SEQ ID NO: 2534 - DNA, 20 bp, Homo Sapiens
gcttatacacttacacttta

SEQ ID NO: 2535 - DNA, 20 bp, Homo Sapiens
cttatacacttacactttat

SEQ ID NO: 2536 - DNA, 20 bp, Homo Sapiens
ttatacacttacactttatg

SEQ ID NO: 2537 - DNA, 20 bp, Homo Sapiens
tatacacttacactttatgc

SEQ ID NO: 2538 - DNA, 20 bp, Homo Sapiens
atacacttacactttatgca

SEQ ID NO: 2539 - DNA, 20 bp, Homo Sapiens
tacacttacactttatgcac

SEQ ID NO: 2540 - DNA, 20 bp, Homo Sapiens
acacttacactttatgcaca

SEQ ID NO: 2541 - DNA, 20 bp, Homo Sapiens
cacttacactttatgcacaa

SEQ ID NO: 2542 - DNA, 20 bp, Homo Sapiens
acttacactttatgcacaaa

SEQ ID NO: 2543 - DNA, 20 bp, Homo Sapiens
aatgtagggttataataatg

SEQ ID NO: 2544 - DNA, 20 bp, Homo Sapiens
atgtagggttataataatgt

SEQ ID NO: 2545 - DNA, 20 bp, Homo Sapiens
tgtagggttataataatgtt

SEQ ID NO: 2546 - DNA, 20 bp, Homo Sapiens
gtagggttataataatgtta

SEQ ID NO: 2547 - DNA, 20 bp, Homo Sapiens
agggttataataatgttaac

SEQ ID NO: 2548 - DNA, 20 bp, Homo Sapiens
gggttataataatgttaaca

SEQ ID NO: 2549 - DNA, 20 bp, Homo Sapiens
ataataatgttaacatggac

SEQ ID NO: 2550 - DNA, 20 bp, Homo Sapiens
taataatgttaacatggaca

SEQ ID NO: 2551 - DNA, 20 bp, Homo Sapiens
aataatgttaacatggacat

SEQ ID NO: 2552 - DNA, 20 bp, Homo Sapiens
ataatgttaacatggacatg

SEQ ID NO: 2553 - DNA, 20 bp, Homo Sapiens
taatgttaacatggacatga

SEQ ID NO: 2554 - DNA, 20 bp, Homo Sapiens
aatgttaacatggacatgat

SEQ ID NO: 2555 - DNA, 20 bp, Homo Sapiens
atgttaacatggacatgatc

SEQ ID NO: 2556 - DNA, 20 bp, Homo Sapiens
tgttaacatggacatgatct

SEQ ID NO: 2557 - DNA, 20 bp, Homo Sapiens
gttaacatggacatgatctt

SEQ ID NO: 2558 - DNA, 20 bp, Homo Sapiens
ttaacatggacatgatcttc

SEQ ID NO: 2559 - DNA, 20 bp, Homo Sapiens
taacatggacatgatcttct

SEQ ID NO: 2560 - DNA, 20 bp, Homo Sapiens
aacatggacatgatcttctt

SEQ ID NO: 2561 - DNA, 20 bp, Homo Sapiens
acatggacatgatcttcttt

SEQ ID NO: 2562 - DNA, 20 bp, Homo Sapiens
catggacatgatcttcttta

SEQ ID NO: 2563 - DNA, 20 bp, Homo Sapiens
atggacatgatcttctttat

SEQ ID NO: 2564 - DNA, 20 bp, Homo Sapiens
tggacatgatcttctttata

SEQ ID NO: 2565 - DNA, 20 bp, Homo Sapiens
ggacatgatcttctttataa

SEQ ID NO: 2566 - DNA, 20 bp, Homo Sapiens
gacatgatcttctttataat

SEQ ID NO: 2567 - DNA, 20 bp, Homo Sapiens
catgatcttctttataattc

SEQ ID NO: 2568 - DNA, 20 bp, Homo Sapiens
gatcttctttataattctac

SEQ ID NO: 2569 - DNA, 20 bp, Homo Sapiens
ctttataattctactttgag

SEQ ID NO: 2570 - DNA, 20 bp, Homo Sapiens
ttataattctactttgagtg

SEQ ID NO: 2571 - DNA, 20 bp, Homo Sapiens
tataattctactttgagtgc

SEQ ID NO: 2572 - DNA, 20 bp, Homo Sapiens
ataattctactttgagtgct

SEQ ID NO: 2573 - DNA, 20 bp, Homo Sapiens
taattctactttgagtgctg

SEQ ID NO: 2574 - DNA, 20 bp, Homo Sapiens
aattctactttgagtgctgt

SEQ ID NO: 2575 - DNA, 20 bp, Homo Sapiens
attctactttgagtgctgtc

SEQ ID NO: 2576 - DNA, 20 bp, Homo Sapiens
ttctactttgagtgctgtct

SEQ ID NO: 2577 - DNA, 20 bp, Homo Sapiens
tctactttgagtgctgtctc

SEQ ID NO: 2578 - DNA, 20 bp, Homo Sapiens
ctactttgagtgctgtctcc

SEQ ID NO: 2579 - DNA, 20 bp, Homo Sapiens
tactttgagtgctgtctcca

SEQ ID NO: 2580 - DNA, 20 bp, Homo Sapiens
actttgagtgctgtctccat

SEQ ID NO: 2581 - DNA, 20 bp, Homo Sapiens
ctttgagtgctgtctccatg

SEQ ID NO: 2582 - DNA, 20 bp, Homo Sapiens
tttgagtgctgtctccatgt

SEQ ID NO: 2583 - DNA, 20 bp, Homo Sapiens
ttgagtgctgtctccatgtt

SEQ ID NO: 2584 - DNA, 20 bp, Homo Sapiens
tgagtgctgtctccatgttt

SEQ ID NO: 2585 - DNA, 20 bp, Homo Sapiens
gagtgctgtctccatgtttg

SEQ ID NO: 2586 - DNA, 20 bp, Homo Sapiens
agtgctgtctccatgtttga

SEQ ID NO: 2587 - DNA, 20 bp, Homo Sapiens
gtgctgtctccatgtttgat

SEQ ID NO: 2588 - DNA, 20 bp, Homo Sapiens
tgctgtctccatgtttgatg

SEQ ID NO: 2589 - DNA, 20 bp, Homo Sapiens
gctgtctccatgtttgatgt

SEQ ID NO: 2590 - DNA, 20 bp, Homo Sapiens
ctgtctccatgtttgatgta

SEQ ID NO: 2591 - DNA, 20 bp, Homo Sapiens
tgtctccatgtttgatgtat

SEQ ID NO: 2592 - DNA, 20 bp, Homo Sapiens
gtctccatgtttgatgtatc

SEQ ID NO: 2593 - DNA, 20 bp, Homo Sapiens
tctccatgtttgatgtatct

SEQ ID NO: 2594 - DNA, 20 bp, Homo Sapiens
ctccatgtttgatgtatctg

SEQ ID NO: 2595 - DNA, 20 bp, Homo Sapiens
tccatgtttgatgtatctga

SEQ ID NO: 2596 - DNA, 20 bp, Homo Sapiens
ccatgtttgatgtatctgag

SEQ ID NO: 2597 - DNA, 20 bp, Homo Sapiens
catgtttgatgtatctgagc

SEQ ID NO: 2598 - DNA, 20 bp, Homo Sapiens
atgtttgatgtatctgagca

SEQ ID NO: 2599 - DNA, 20 bp, Homo Sapiens
tgtttgatgtatctgagcag

SEQ ID NO: 2600 - DNA, 20 bp, Homo Sapiens
gtttgatgtatctgagcagg

SEQ ID NO: 2601 - DNA, 20 bp, Homo Sapiens
tttgatgtatctgagcaggt

SEQ ID NO: 2602 - DNA, 20 bp, Homo Sapiens
ttgatgtatctgagcaggtt

SEQ ID NO: 2603 - DNA, 20 bp, Homo Sapiens
tgatgtatctgagcaggttg

SEQ ID NO: 2604 - DNA, 20 bp, Homo Sapiens
gatgtatctgagcaggttgc

SEQ ID NO: 2605 - DNA, 20 bp, Homo Sapiens
atgtatctgagcaggttgct

SEQ ID NO: 2606 - DNA, 20 bp, Homo Sapiens
tgtatctgagcaggttgctc

SEQ ID NO: 2607 - DNA, 20 bp, Homo Sapiens
gtatctgagcaggttgctcc

SEQ ID NO: 2608 - DNA, 20 bp, Homo Sapiens
tatctgagcaggttgctcca

SEQ ID NO: 2609 - DNA, 20 bp, Homo Sapiens
atctgagcaggttgctccac

SEQ ID NO: 2610 - DNA, 20 bp, Homo Sapiens
tctgagcaggttgctccaca

SEQ ID NO: 2611 - DNA, 20 bp, Homo Sapiens
agcaggttgctccacaggta

SEQ ID NO: 2612 - DNA, 20 bp, Homo Sapiens
aggttgctccacaggtagct

SEQ ID NO: 2613 - DNA, 20 bp, Homo Sapiens
gttgctccacaggtagctct

SEQ ID NO: 2614 - DNA, 20 bp, Homo Sapiens
ttgctccacaggtagctcta

SEQ ID NO: 2615 - DNA, 20 bp, Homo Sapiens
tgctccacaggtagctctag

SEQ ID NO: 2616 - DNA, 20 bp, Homo Sapiens
ctccacaggtagctctagga

SEQ ID NO: 2617 - DNA, 20 bp, Homo Sapiens
tccacaggtagctctaggag

SEQ ID NO: 2618 - DNA, 20 bp, Homo Sapiens
tctaggagggctggcaactt

SEQ ID NO: 2619 - DNA, 20 bp, Homo Sapiens
ctaggagggctggcaactta

SEQ ID NO: 2620 - DNA, 20 bp, Homo Sapiens
taggagggctggcaacttag

SEQ ID NO: 2621 - DNA, 20 bp, Homo Sapiens
aggagggctggcaacttaga

SEQ ID NO: 2622 - DNA, 20 bp, Homo Sapiens
agggctggcaacttagaggt

SEQ ID NO: 2623 - DNA, 20 bp, Homo Sapiens
gggagcagagaattctctta

SEQ ID NO: 2624 - DNA, 20 bp, Homo Sapiens
ggagcagagaattctcttat

SEQ ID NO: 2625 - DNA, 20 bp, Homo Sapiens
gagcagagaattctcttatc

SEQ ID NO: 2626 - DNA, 20 bp, Homo Sapiens
agcagagaattctcttatcc

SEQ ID NO: 2627 - DNA, 20 bp, Homo Sapiens
gcagagaattctcttatcca

SEQ ID NO: 2628 - DNA, 20 bp, Homo Sapiens
cagagaattctcttatccaa

SEQ ID NO: 2629 - DNA, 20 bp, Homo Sapiens
agagaattctcttatccaac

SEQ ID NO: 2630 - DNA, 20 bp, Homo Sapiens
gagaattctcttatccaaca

SEQ ID NO: 2631 - DNA, 20 bp, Homo Sapiens
agaattctcttatccaacat

SEQ ID NO: 2632 - DNA, 20 bp, Homo Sapiens
gaattctcttatccaacatc

SEQ ID NO: 2633 - DNA, 20 bp, Homo Sapiens
aattctcttatccaacatca

SEQ ID NO: 2634 - DNA, 20 bp, Homo Sapiens
attctcttatccaacatcaa

SEQ ID NO: 2635 - DNA, 20 bp, Homo Sapiens
ttctcttatccaacatcaac

SEQ ID NO: 2636 - DNA, 20 bp, Homo Sapiens
tctcttatccaacatcaaca

SEQ ID NO: 2637 - DNA, 20 bp, Homo Sapiens
ctcttatccaacatcaacat

SEQ ID NO: 2638 - DNA, 20 bp, Homo Sapiens
tcttatccaacatcaacatc

SEQ ID NO: 2639 - DNA, 20 bp, Homo Sapiens
cttatccaacatcaacatct

SEQ ID NO: 2640 - DNA, 20 bp, Homo Sapiens
ttatccaacatcaacatctt

SEQ ID NO: 2641 - DNA, 20 bp, Homo Sapiens
tatccaacatcaacatcttg

SEQ ID NO: 2642 - DNA, 20 bp, Homo Sapiens
atccaacatcaacatcttgg

SEQ ID NO: 2643 - DNA, 20 bp, Homo Sapiens
tccaacatcaacatcttggt

SEQ ID NO: 2644 - DNA, 20 bp, Homo Sapiens
ccaacatcaacatcttggtc

SEQ ID NO: 2645 - DNA, 20 bp, Homo Sapiens
caacatcaacatcttggtca

SEQ ID NO: 2646 - DNA, 20 bp, Homo Sapiens
aacatcaacatcttggtcag

SEQ ID NO: 2647 - DNA, 20 bp, Homo Sapiens
acatcaacatcttggtcaga

SEQ ID NO: 2648 - DNA, 20 bp, Homo Sapiens
catcaacatcttggtcagat

SEQ ID NO: 2649 - DNA, 20 bp, Homo Sapiens
atcaacatcttggtcagatt

SEQ ID NO: 2650 - DNA, 20 bp, Homo Sapiens
tcaacatcttggtcagattt

SEQ ID NO: 2651 - DNA, 20 bp, Homo Sapiens
caacatcttggtcagatttg

SEQ ID NO: 2652 - DNA, 20 bp, Homo Sapiens
aacatcttggtcagatttga

SEQ ID NO: 2653 - DNA, 20 bp, Homo Sapiens
acatcttggtcagatttgaa

SEQ ID NO: 2654 - DNA, 20 bp, Homo Sapiens
catcttggtcagatttgaac

SEQ ID NO: 2655 - DNA, 20 bp, Homo Sapiens
atcttggtcagatttgaact

SEQ ID NO: 2656 - DNA, 20 bp, Homo Sapiens
tcttggtcagatttgaactc

SEQ ID NO: 2657 - DNA, 20 bp, Homo Sapiens
cttggtcagatttgaactct

SEQ ID NO: 2658 - DNA, 20 bp, Homo Sapiens
ttggtcagatttgaactctt

SEQ ID NO: 2659 - DNA, 20 bp, Homo Sapiens
tggtcagatttgaactcttc

SEQ ID NO: 2660 - DNA, 20 bp, Homo Sapiens
ggtcagatttgaactcttca

SEQ ID NO: 2661 - DNA, 20 bp, Homo Sapiens
gtcagatttgaactcttcaa

SEQ ID NO: 2662 - DNA, 20 bp, Homo Sapiens
tcagatttgaactcttcaat

SEQ ID NO: 2663 - DNA, 20 bp, Homo Sapiens
cagatttgaactcttcaatc

SEQ ID NO: 2664 - DNA, 20 bp, Homo Sapiens
agatttgaactcttcaatct

SEQ ID NO: 2665 - DNA, 20 bp, Homo Sapiens
gatttgaactcttcaatctc

SEQ ID NO: 2666 - DNA, 20 bp, Homo Sapiens
atttgaactcttcaatctct

SEQ ID NO: 2667 - DNA, 20 bp, Homo Sapiens
tttgaactcttcaatctctt

SEQ ID NO: 2668 - DNA, 20 bp, Homo Sapiens
ttgaactcttcaatctcttg

SEQ ID NO: 2669 - DNA, 20 bp, Homo Sapiens
tgaactcttcaatctcttgc

SEQ ID NO: 2670 - DNA, 20 bp, Homo Sapiens
gaactcttcaatctcttgca

SEQ ID NO: 2671 - DNA, 20 bp, Homo Sapiens
aactcttcaatctcttgcac

SEQ ID NO: 2672 - DNA, 20 bp, Homo Sapiens
actcttcaatctcttgcact

SEQ ID NO: 2673 - DNA, 20 bp, Homo Sapiens
ctcttcaatctcttgcactc

SEQ ID NO: 2674 - DNA, 20 bp, Homo Sapiens
tcttcaatctcttgcactca

SEQ ID NO: 2675 - DNA, 20 bp, Homo Sapiens
cttcaatctcttgcactcaa

SEQ ID NO: 2676 - DNA, 20 bp, Homo Sapiens
ttcaatctcttgcactcaaa

SEQ ID NO: 2677 - DNA, 20 bp, Homo Sapiens
tcaatctcttgcactcaaag

SEQ ID NO: 2678 - DNA, 20 bp, Homo Sapiens
caatctcttgcactcaaagc

SEQ ID NO: 2679 - DNA, 20 bp, Homo Sapiens
aatctcttgcactcaaagct

SEQ ID NO: 2680 - DNA, 20 bp, Homo Sapiens
atctcttgcactcaaagctt

SEQ ID NO: 2681 - DNA, 20 bp, Homo Sapiens
tctcttgcactcaaagcttg

SEQ ID NO: 2682 - DNA, 20 bp, Homo Sapiens
ctcttgcactcaaagcttgt

SEQ ID NO: 2683 - DNA, 20 bp, Homo Sapiens
tcttgcactcaaagcttgtt

SEQ ID NO: 2684 - DNA, 20 bp, Homo Sapiens
cttgcactcaaagcttgtta

SEQ ID NO: 2685 - DNA, 20 bp, Homo Sapiens
ttgcactcaaagcttgttaa

SEQ ID NO: 2686 - DNA, 20 bp, Homo Sapiens
tgcactcaaagcttgttaag

SEQ ID NO: 2687 - DNA, 20 bp, Homo Sapiens
gcactcaaagcttgttaaga

SEQ ID NO: 2688 - DNA, 20 bp, Homo Sapiens
cactcaaagcttgttaagat

SEQ ID NO: 2689 - DNA, 20 bp, Homo Sapiens
actcaaagcttgttaagata

SEQ ID NO: 2690 - DNA, 20 bp, Homo Sapiens
ctcaaagcttgttaagatag

SEQ ID NO: 2691 - DNA, 20 bp, Homo Sapiens
tcaaagcttgttaagatagt

SEQ ID NO: 2692 - DNA, 20 bp, Homo Sapiens
caaagcttgttaagatagtt

SEQ ID NO: 2693 - DNA, 20 bp, Homo Sapiens
aaagcttgttaagatagtta

SEQ ID NO: 2694 - DNA, 20 bp, Homo Sapiens
aagcttgttaagatagttaa

SEQ ID NO: 2695 - DNA, 20 bp, Homo Sapiens
agcttgttaagatagttaag

SEQ ID NO: 2696 - DNA, 20 bp, Homo Sapiens
gcttgttaagatagttaagc

SEQ ID NO: 2697 - DNA, 20 bp, Homo Sapiens
cttgttaagatagttaagcg

SEQ ID NO: 2698 - DNA, 20 bp, Homo Sapiens
ttgttaagatagttaagcgt

SEQ ID NO: 2699 - DNA, 20 bp, Homo Sapiens
tgttaagatagttaagcgtg

SEQ ID NO: 2700 - DNA, 20 bp, Homo Sapiens
gttaagatagttaagcgtgc

SEQ ID NO: 2701 - DNA, 20 bp, Homo Sapiens
ttaagatagttaagcgtgca

SEQ ID NO: 2702 - DNA, 20 bp, Homo Sapiens
taagatagttaagcgtgcat

SEQ ID NO: 2703 - DNA, 20 bp, Homo Sapiens
aagatagttaagcgtgcata

SEQ ID NO: 2704 - DNA, 20 bp, Homo Sapiens
agatagttaagcgtgcataa

SEQ ID NO: 2705 - DNA, 20 bp, Homo Sapiens
gatagttaagcgtgcataag

SEQ ID NO: 2706 - DNA, 20 bp, Homo Sapiens
atagttaagcgtgcataagt

SEQ ID NO: 2707 - DNA, 20 bp, Homo Sapiens
tagttaagcgtgcataagtt

SEQ ID NO: 2708 - DNA, 20 bp, Homo Sapiens
agttaagcgtgcataagtta

SEQ ID NO: 2709 - DNA, 20 bp, Homo Sapiens
gttaagcgtgcataagttaa

SEQ ID NO: 2710 - DNA, 20 bp, Homo Sapiens
ttaagcgtgcataagttaac

SEQ ID NO: 2711 - DNA, 20 bp, Homo Sapiens
taagcgtgcataagttaact

SEQ ID NO: 2712 - DNA, 20 bp, Homo Sapiens
aagcgtgcataagttaactt

SEQ ID NO: 2713 - DNA, 20 bp, Homo Sapiens
agcgtgcataagttaacttc

SEQ ID NO: 2714 - DNA, 20 bp, Homo Sapiens
gcgtgcataagttaacttcc

SEQ ID NO: 2715 - DNA, 20 bp, Homo Sapiens
cgtgcataagttaacttcca

SEQ ID NO: 2716 - DNA, 20 bp, Homo Sapiens
gtgcataagttaacttccaa

SEQ ID NO: 2717 - DNA, 20 bp, Homo Sapiens
tgcataagttaacttccaat

SEQ ID NO: 2718 - DNA, 20 bp, Homo Sapiens
gcataagttaacttccaatt

SEQ ID NO: 2719 - DNA, 20 bp, Homo Sapiens
cataagttaacttccaattt

SEQ ID NO: 2720 - DNA, 20 bp, Homo Sapiens
taagttaacttccaatttac

SEQ ID NO: 2721 - DNA, 20 bp, Homo Sapiens
aagttaacttccaatttaca

SEQ ID NO: 2722 - DNA, 20 bp, Homo Sapiens
agttaacttccaatttacat

SEQ ID NO: 2723 - DNA, 20 bp, Homo Sapiens
gttaacttccaatttacata

SEQ ID NO: 2724 - DNA, 20 bp, Homo Sapiens
ttaacttccaatttacatac

SEQ ID NO: 2725 - DNA, 20 bp, Homo Sapiens
taacttccaatttacatact

SEQ ID NO: 2726 - DNA, 20 bp, Homo Sapiens
aacttccaatttacatactc

SEQ ID NO: 2727 - DNA, 20 bp, Homo Sapiens
acttccaatttacatactct

SEQ ID NO: 2728 - DNA, 20 bp, Homo Sapiens
cttccaatttacatactctg

SEQ ID NO: 2729 - DNA, 20 bp, Homo Sapiens
ttccaatttacatactctgc

SEQ ID NO: 2730 - DNA, 20 bp, Homo Sapiens
tccaatttacatactctgct

SEQ ID NO: 2731 - DNA, 20 bp, Homo Sapiens
ccaatttacatactctgctt

SEQ ID NO: 2732 - DNA, 20 bp, Homo Sapiens
caatttacatactctgctta

SEQ ID NO: 2733 - DNA, 20 bp, Homo Sapiens
aatttacatactctgcttag

SEQ ID NO: 2734 - DNA, 20 bp, Homo Sapiens
atttacatactctgcttaga

SEQ ID NO: 2735 - DNA, 20 bp, Homo Sapiens
tttacatactctgcttagaa

SEQ ID NO: 2736 - DNA, 20 bp, Homo Sapiens
ttacatactctgcttagaat

SEQ ID NO: 2737 - DNA, 20 bp, Homo Sapiens
tacatactctgcttagaatt

SEQ ID NO: 2738 - DNA, 20 bp, Homo Sapiens
acatactctgcttagaattt

SEQ ID NO: 2739 - DNA, 20 bp, Homo Sapiens
catactctgcttagaatttg

SEQ ID NO: 2740 - DNA, 20 bp, Homo Sapiens
atactctgcttagaatttgg

SEQ ID NO: 2741 - DNA, 20 bp, Homo Sapiens
tactctgcttagaatttggg

SEQ ID NO: 2742 - DNA, 20 bp, Homo Sapiens
ttagaaatataattgacagg

SEQ ID NO: 2743 - DNA, 20 bp, Homo Sapiens
tagaaatataattgacagga

SEQ ID NO: 2744 - DNA, 20 bp, Homo Sapiens
agaaatataattgacaggat

SEQ ID NO: 2745 - DNA, 20 bp, Homo Sapiens
gaaatataattgacaggatt

SEQ ID NO: 2746 - DNA, 20 bp, Homo Sapiens
tataattgacaggattattg

SEQ ID NO: 2747 - DNA, 20 bp, Homo Sapiens
ataattgacaggattattgg

SEQ ID NO: 2748 - DNA, 20 bp, Homo Sapiens
taattgacaggattattgga

SEQ ID NO: 2749 - DNA, 20 bp, Homo Sapiens
aattgacaggattattggaa

SEQ ID NO: 2750 - DNA, 20 bp, Homo Sapiens
attgacaggattattggaaa

SEQ ID NO: 2751 - DNA, 20 bp, Homo Sapiens
ttgacaggattattggaaat

SEQ ID NO: 2752 - DNA, 20 bp, Homo Sapiens
tgacaggattattggaaatt

SEQ ID NO: 2753 - DNA, 20 bp, Homo Sapiens
gacaggattattggaaattt

SEQ ID NO: 2754 - DNA, 20 bp, Homo Sapiens
acaggattattggaaatttg

SEQ ID NO: 2755 - DNA, 20 bp, Homo Sapiens
caggattattggaaatttgt

SEQ ID NO: 2756 - DNA, 20 bp, Homo Sapiens
aggattattggaaatttgtt

SEQ ID NO: 2757 - DNA, 20 bp, Homo Sapiens
ggattattggaaatttgtta

SEQ ID NO: 2758 - DNA, 20 bp, Homo Sapiens
atacatttgataaagtaagg

SEQ ID NO: 2759 - DNA, 20 bp, Homo Sapiens
tacatttgataaagtaaggc

SEQ ID NO: 2760 - DNA, 20 bp, Homo Sapiens
acatttgataaagtaaggca

SEQ ID NO: 2761 - DNA, 20 bp, Homo Sapiens
catttgataaagtaaggcat

SEQ ID NO: 2762 - DNA, 20 bp, Homo Sapiens
atttgataaagtaaggcatg

SEQ ID NO: 2763 - DNA, 20 bp, Homo Sapiens
tttgataaagtaaggcatgg

SEQ ID NO: 2764 - DNA, 20 bp, Homo Sapiens
ttgataaagtaaggcatggt

SEQ ID NO: 2765 - DNA, 20 bp, Homo Sapiens
tgataaagtaaggcatggtt

SEQ ID NO: 2766 - DNA, 20 bp, Homo Sapiens
gataaagtaaggcatggttg

SEQ ID NO: 2767 - DNA, 20 bp, Homo Sapiens
ataaagtaaggcatggttgt

SEQ ID NO: 2768 - DNA, 20 bp, Homo Sapiens
taaagtaaggcatggttgtg

SEQ ID NO: 2769 - DNA, 20 bp, Homo Sapiens
aaagtaaggcatggttgtgg

SEQ ID NO: 2770 - DNA, 20 bp, Homo Sapiens
aagtaaggcatggttgtggt

SEQ ID NO: 2771 - DNA, 20 bp, Homo Sapiens
agtaaggcatggttgtggtt

SEQ ID NO: 2772 - DNA, 20 bp, Homo Sapiens
gtaaggcatggttgtggtta

SEQ ID NO: 2773 - DNA, 20 bp, Homo Sapiens
taaggcatggttgtggttaa

SEQ ID NO: 2774 - DNA, 20 bp, Homo Sapiens
aaggcatggttgtggttaat

SEQ ID NO: 2775 - DNA, 20 bp, Homo Sapiens
aggcatggttgtggttaatc

SEQ ID NO: 2776 - DNA, 20 bp, Homo Sapiens
ggcatggttgtggttaatct

SEQ ID NO: 2777 - DNA, 20 bp, Homo Sapiens
gcatggttgtggttaatctg

SEQ ID NO: 2778 - DNA, 20 bp, Homo Sapiens
catggttgtggttaatctgg

SEQ ID NO: 2779 - DNA, 20 bp, Homo Sapiens
atggttgtggttaatctggt

SEQ ID NO: 2780 - DNA, 20 bp, Homo Sapiens
tggttgtggttaatctggtt

SEQ ID NO: 2781 - DNA, 20 bp, Homo Sapiens
ggttgtggttaatctggttt

SEQ ID NO: 2782 - DNA, 20 bp, Homo Sapiens
gttgtggttaatctggttta

SEQ ID NO: 2783 - DNA, 20 bp, Homo Sapiens
ttgtggttaatctggtttat

SEQ ID NO: 2784 - DNA, 20 bp, Homo Sapiens
tgtggttaatctggtttatt

SEQ ID NO: 2785 - DNA, 20 bp, Homo Sapiens
gtggttaatctggtttattt

SEQ ID NO: 2786 - DNA, 20 bp, Homo Sapiens
tttgttccacaagttaaata

SEQ ID NO: 2787 - DNA, 20 bp, Homo Sapiens
ttgttccacaagttaaataa

SEQ ID NO: 2788 - DNA, 20 bp, Homo Sapiens
tgttccacaagttaaataaa

SEQ ID NO: 2789 - DNA, 20 bp, Homo Sapiens
gttccacaagttaaataaat

SEQ ID NO: 2790 - DNA, 20 bp, Homo Sapiens
ttccacaagttaaataaatc

SEQ ID NO: 2791 - DNA, 20 bp, Homo Sapiens
tccacaagttaaataaatca

SEQ ID NO: 2792 - DNA, 20 bp, Homo Sapiens
ccacaagttaaataaatcat

SEQ ID NO: 2793 - DNA, 22 bp, Homo Sapiens
attcctgaagctgacagcattc

SEQ ID NO: 2794 - DNA, 22 bp, Homo Sapiens
ttcctgaagctgacagcattcg

SEQ ID NO: 2795 - DNA, 22 bp, Homo Sapiens
tcctgaagctgacagcattcgg

SEQ ID NO: 2796 - DNA, 22 bp, Homo Sapiens
cctgaagctgacagcattcggg

SEQ ID NO: 2797 - DNA, 22 bp, Homo Sapiens
ctgaagctgacagcattcgggc

SEQ ID NO: 2798 - DNA, 22 bp, Homo Sapiens
tgaagctgacagcattcgggcc

SEQ ID NO: 2799 - DNA, 22 bp, Homo Sapiens
agatgtctcgctccgtggcctt

SEQ ID NO: 2800 - DNA, 22 bp, Homo Sapiens
gatgtctcgctccgtggcctta

SEQ ID NO: 2801 - DNA, 22 bp, Homo Sapiens
atgtctcgctccgtggccttag

SEQ ID NO: 2802 - DNA, 22 bp, Homo Sapiens
ccttagctgtgctcgcgctact

SEQ ID NO: 2803 - DNA, 22 bp, Homo Sapiens
cttagctgtgctcgcgctactc

SEQ ID NO: 2804 - DNA, 22 bp, Homo Sapiens
ttagctgtgctcgcgctactct

SEQ ID NO: 2805 - DNA, 22 bp, Homo Sapiens
tagctgtgctcgcgctactctc

SEQ ID NO: 2806 - DNA, 22 bp, Homo Sapiens
agctgtgctcgcgctactctct

SEQ ID NO: 2807 - DNA, 22 bp, Homo Sapiens
ctgtgctcgcgctactctctct

SEQ ID NO: 2808 - DNA, 22 bp, Homo Sapiens
tgtgctcgcgctactctctctt

SEQ ID NO: 2809 - DNA, 22 bp, Homo Sapiens
gtgctcgcgctactctctcttt

SEQ ID NO: 2810 - DNA, 22 bp, Homo Sapiens
tgctcgcgctactctctctttc

SEQ ID NO: 2811 - DNA, 22 bp, Homo Sapiens
gctcgcgctactctctctttct

SEQ ID NO: 2812 - DNA, 22 bp, Homo Sapiens
ctcgcgctactctctctttctg

SEQ ID NO: 2813 - DNA, 22 bp, Homo Sapiens
tcgcgctactctctctttctgg

SEQ ID NO: 2814 - DNA, 22 bp, Homo Sapiens
cgcgctactctctctttctggc

SEQ ID NO: 2815 - DNA, 22 bp, Homo Sapiens
gcgctactctctctttctggcc

SEQ ID NO: 2816 - DNA, 22 bp, Homo Sapiens
cgctactctctctttctggcct

SEQ ID NO: 2817 - DNA, 22 bp, Homo Sapiens
gctactctctctttctggcctg

SEQ ID NO: 2818 - DNA, 22 bp, Homo Sapiens
ctactctctctttctggcctgg

SEQ ID NO: 2819 - DNA, 22 bp, Homo Sapiens
tactctctctttctggcctgga

SEQ ID NO: 2820 - DNA, 22 bp, Homo Sapiens
actctctctttctggcctggag

SEQ ID NO: 2821 - DNA, 22 bp, Homo Sapiens
ctctctctttctggcctggagg

SEQ ID NO: 2822 - DNA, 22 bp, Homo Sapiens
tctctctttctggcctggaggc

SEQ ID NO: 2823 - DNA, 22 bp, Homo Sapiens
ctctctttctggcctggaggct

SEQ ID NO: 2824 - DNA, 22 bp, Homo Sapiens
tctctttctggcctggaggcta

SEQ ID NO: 2825 - DNA, 22 bp, Homo Sapiens
ctctttctggcctggaggctat

SEQ ID NO: 2826 - DNA, 22 bp, Homo Sapiens
tctttctggcctggaggctatc

SEQ ID NO: 2827 - DNA, 22 bp, Homo Sapiens
ctttctggcctggaggctatcc

SEQ ID NO: 2828 - DNA, 22 bp, Homo Sapiens
tttctggcctggaggctatcca

SEQ ID NO: 2829 - DNA, 22 bp, Homo Sapiens
ttctggcctggaggctatccag

SEQ ID NO: 2830 - DNA, 22 bp, Homo Sapiens
cctggaggctatccagcgtact

SEQ ID NO: 2831 - DNA, 22 bp, Homo Sapiens
ctggaggctatccagcgtactc

SEQ ID NO: 2832 - DNA, 22 bp, Homo Sapiens
tggaggctatccagcgtactcc

SEQ ID NO: 2833 - DNA, 22 bp, Homo Sapiens
ggaggctatccagcgtactcca

SEQ ID NO: 2834 - DNA, 22 bp, Homo Sapiens
gaggctatccagcgtactccaa

SEQ ID NO: 2835 - DNA, 22 bp, Homo Sapiens
aggctatccagcgtactccaaa

SEQ ID NO: 2836 - DNA, 22 bp, Homo Sapiens
ggctatccagcgtactccaaag

SEQ ID NO: 2837 - DNA, 22 bp, Homo Sapiens
gctatccagcgtactccaaaga

SEQ ID NO: 2838 - DNA, 22 bp, Homo Sapiens
ctatccagcgtactccaaagat

SEQ ID NO: 2839 - DNA, 22 bp, Homo Sapiens
tatccagcgtactccaaagatt

SEQ ID NO: 2840 - DNA, 22 bp, Homo Sapiens
atccagcgtactccaaagattc

SEQ ID NO: 2841 - DNA, 22 bp, Homo Sapiens
tccagcgtactccaaagattca

SEQ ID NO: 2842 - DNA, 22 bp, Homo Sapiens
ccagcgtactccaaagattcag

SEQ ID NO: 2843 - DNA, 22 bp, Homo Sapiens
cagcgtactccaaagattcagg

SEQ ID NO: 2844 - DNA, 22 bp, Homo Sapiens
agcgtactccaaagattcaggt

SEQ ID NO: 2845 - DNA, 22 bp, Homo Sapiens
gcgtactccaaagattcaggtt

SEQ ID NO: 2846 - DNA, 22 bp, Homo Sapiens
cgtactccaaagattcaggttt

SEQ ID NO: 2847 - DNA, 22 bp, Homo Sapiens
gtactccaaagattcaggttta

SEQ ID NO: 2848 - DNA, 22 bp, Homo Sapiens
tactccaaagattcaggtttac

SEQ ID NO: 2849 - DNA, 22 bp, Homo Sapiens
actccaaagattcaggtttact

SEQ ID NO: 2850 - DNA, 22 bp, Homo Sapiens
ctccaaagattcaggtttactc

SEQ ID NO: 2851 - DNA, 22 bp, Homo Sapiens
tccaaagattcaggtttactca

SEQ ID NO: 2852 - DNA, 22 bp, Homo Sapiens
ccaaagattcaggtttactcac

SEQ ID NO: 2853 - DNA, 22 bp, Homo Sapiens
caaagattcaggtttactcacg

SEQ ID NO: 2854 - DNA, 22 bp, Homo Sapiens
aaagattcaggtttactcacgt

SEQ ID NO: 2855 - DNA, 22 bp, Homo Sapiens
aagattcaggtttactcacgtc

SEQ ID NO: 2856 - DNA, 22 bp, Homo Sapiens
agattcaggtttactcacgtca

SEQ ID NO: 2857 - DNA, 22 bp, Homo Sapiens
gattcaggtttactcacgtcat

SEQ ID NO: 2858 - DNA, 22 bp, Homo Sapiens
attcaggtttactcacgtcatc

SEQ ID NO: 2859 - DNA, 22 bp, Homo Sapiens
ttcaggtttactcacgtcatcc

SEQ ID NO: 2860 - DNA, 22 bp, Homo Sapiens
tcaggtttactcacgtcatcca

SEQ ID NO: 2861 - DNA, 22 bp, Homo Sapiens
caggtttactcacgtcatccag

SEQ ID NO: 2862 - DNA, 22 bp, Homo Sapiens
aggtttactcacgtcatccagc

SEQ ID NO: 2863 - DNA, 22 bp, Homo Sapiens
ggtttactcacgtcatccagca

SEQ ID NO: 2864 - DNA, 22 bp, Homo Sapiens
gtttactcacgtcatccagcag

SEQ ID NO: 2865 - DNA, 22 bp, Homo Sapiens
tttactcacgtcatccagcaga

SEQ ID NO: 2866 - DNA, 22 bp, Homo Sapiens
ttactcacgtcatccagcagag

SEQ ID NO: 2867 - DNA, 22 bp, Homo Sapiens
tactcacgtcatccagcagaga

SEQ ID NO: 2868 - DNA, 22 bp, Homo Sapiens
actcacgtcatccagcagagaa

SEQ ID NO: 2869 - DNA, 22 bp, Homo Sapiens
ctcacgtcatccagcagagaat

SEQ ID NO: 2870 - DNA, 22 bp, Homo Sapiens
tcacgtcatccagcagagaatg

SEQ ID NO: 2871 - DNA, 22 bp, Homo Sapiens
cacgtcatccagcagagaatgg

SEQ ID NO: 2872 - DNA, 22 bp, Homo Sapiens
acgtcatccagcagagaatgga

SEQ ID NO: 2873 - DNA, 22 bp, Homo Sapiens
cgtcatccagcagagaatggaa

SEQ ID NO: 2874 - DNA, 22 bp, Homo Sapiens
gtcatccagcagagaatggaaa

SEQ ID NO: 2875 - DNA, 22 bp, Homo Sapiens
tcatccagcagagaatggaaag

SEQ ID NO: 2876 - DNA, 22 bp, Homo Sapiens
catccagcagagaatggaaagt

SEQ ID NO: 2877 - DNA, 22 bp, Homo Sapiens
atccagcagagaatggaaagtc

SEQ ID NO: 2878 - DNA, 22 bp, Homo Sapiens
tccagcagagaatggaaagtca

SEQ ID NO: 2879 - DNA, 22 bp, Homo Sapiens
ccagcagagaatggaaagtcaa

SEQ ID NO: 2880 - DNA, 22 bp, Homo Sapiens
cagcagagaatggaaagtcaaa

SEQ ID NO: 2881 - DNA, 22 bp, Homo Sapiens
agcagagaatggaaagtcaaat

SEQ ID NO: 2882 - DNA, 22 bp, Homo Sapiens
gcagagaatggaaagtcaaatt

SEQ ID NO: 2883 - DNA, 22 bp, Homo Sapiens
cagagaatggaaagtcaaattt

SEQ ID NO: 2884 - DNA, 22 bp, Homo Sapiens
agagaatggaaagtcaaatttc

SEQ ID NO: 2885 - DNA, 22 bp, Homo Sapiens
gagaatggaaagtcaaatttcc

SEQ ID NO: 2886 - DNA, 22 bp, Homo Sapiens
agaatggaaagtcaaatttcct

SEQ ID NO: 2887 - DNA, 22 bp, Homo Sapiens
gaatggaaagtcaaatttcctg

SEQ ID NO: 2888 - DNA, 22 bp, Homo Sapiens
aatggaaagtcaaatttcctga

SEQ ID NO: 2889 - DNA, 22 bp, Homo Sapiens
atggaaagtcaaatttcctgaa

SEQ ID NO: 2890 - DNA, 22 bp, Homo Sapiens
tggaaagtcaaatttcctgaat

SEQ ID NO: 2891 - DNA, 22 bp, Homo Sapiens
ggaaagtcaaatttcctgaatt

SEQ ID NO: 2892 - DNA, 22 bp, Homo Sapiens
gaaagtcaaatttcctgaattg

SEQ ID NO: 2893 - DNA, 22 bp, Homo Sapiens
aaagtcaaatttcctgaattgc

SEQ ID NO: 2894 - DNA, 22 bp, Homo Sapiens
aagtcaaatttcctgaattgct

SEQ ID NO: 2895 - DNA, 22 bp, Homo Sapiens
agtcaaatttcctgaattgcta

SEQ ID NO: 2896 - DNA, 22 bp, Homo Sapiens
gtcaaatttcctgaattgctat

SEQ ID NO: 2897 - DNA, 22 bp, Homo Sapiens
tcaaatttcctgaattgctatg

SEQ ID NO: 2898 - DNA, 22 bp, Homo Sapiens
caaatttcctgaattgctatgt

SEQ ID NO: 2899 - DNA, 22 bp, Homo Sapiens
aaatttcctgaattgctatgtg

SEQ ID NO: 2900 - DNA, 22 bp, Homo Sapiens
aatttcctgaattgctatgtgt

SEQ ID NO: 2901 - DNA, 22 bp, Homo Sapiens
atttcctgaattgctatgtgtc

SEQ ID NO: 2902 - DNA, 22 bp, Homo Sapiens
tttcctgaattgctatgtgtct

SEQ ID NO: 2903 - DNA, 22 bp, Homo Sapiens
ttcctgaattgctatgtgtctg

SEQ ID NO: 2904 - DNA, 22 bp, Homo Sapiens
tcctgaattgctatgtgtctgg

SEQ ID NO: 2905 - DNA, 22 bp, Homo Sapiens
cctgaattgctatgtgtctggg

SEQ ID NO: 2906 - DNA, 22 bp, Homo Sapiens
ctgaattgctatgtgtctgggt

SEQ ID NO: 2907 - DNA, 22 bp, Homo Sapiens
tgaattgctatgtgtctgggtt

SEQ ID NO: 2908 - DNA, 22 bp, Homo Sapiens
gaattgctatgtgtctgggttt

SEQ ID NO: 2909 - DNA, 22 bp, Homo Sapiens
aattgctatgtgtctgggtttc

SEQ ID NO: 2910 - DNA, 22 bp, Homo Sapiens
attgctatgtgtctgggtttca

SEQ ID NO: 2911 - DNA, 22 bp, Homo Sapiens
ttgctatgtgtctgggtttcat

SEQ ID NO: 2912 - DNA, 22 bp, Homo Sapiens
tgctatgtgtctgggtttcatc

SEQ ID NO: 2913 - DNA, 22 bp, Homo Sapiens
gctatgtgtctgggtttcatcc

SEQ ID NO: 2914 - DNA, 22 bp, Homo Sapiens
ctatgtgtctgggtttcatcca

SEQ ID NO: 2915 - DNA, 22 bp, Homo Sapiens
tatgtgtctgggtttcatccat

SEQ ID NO: 2916 - DNA, 22 bp, Homo Sapiens
atgtgtctgggtttcatccatc

SEQ ID NO: 2917 - DNA, 22 bp, Homo Sapiens
tgtgtctgggtttcatccatcc

SEQ ID NO: 2918 - DNA, 22 bp, Homo Sapiens
gtgtctgggtttcatccatccg

SEQ ID NO: 2919 - DNA, 22 bp, Homo Sapiens
tgtctgggtttcatccatccga

SEQ ID NO: 2920 - DNA, 22 bp, Homo Sapiens
gtctgggtttcatccatccgac

SEQ ID NO: 2921 - DNA, 22 bp, Homo Sapiens
tctgggtttcatccatccgaca

SEQ ID NO: 2922 - DNA, 22 bp, Homo Sapiens
ctgggtttcatccatccgacat

SEQ ID NO: 2923 - DNA, 22 bp, Homo Sapiens
tgggtttcatccatccgacatt

SEQ ID NO: 2924 - DNA, 22 bp, Homo Sapiens
gggtttcatccatccgacattg

SEQ ID NO: 2925 - DNA, 22 bp, Homo Sapiens
ggtttcatccatccgacattga

SEQ ID NO: 2926 - DNA, 22 bp, Homo Sapiens
gtttcatccatccgacattgaa

SEQ ID NO: 2927 - DNA, 22 bp, Homo Sapiens
tttcatccatccgacattgaag

SEQ ID NO: 2928 - DNA, 22 bp, Homo Sapiens
ttcatccatccgacattgaagt

SEQ ID NO: 2929 - DNA, 22 bp, Homo Sapiens
tcatccatccgacattgaagtt

SEQ ID NO: 2930 - DNA, 22 bp, Homo Sapiens
catccatccgacattgaagttg

SEQ ID NO: 2931 - DNA, 22 bp, Homo Sapiens
atccatccgacattgaagttga

SEQ ID NO: 2932 - DNA, 22 bp, Homo Sapiens
tccatccgacattgaagttgac

SEQ ID NO: 2933 - DNA, 22 bp, Homo Sapiens
ccatccgacattgaagttgact

SEQ ID NO: 2934 - DNA, 22 bp, Homo Sapiens
catccgacattgaagttgactt

SEQ ID NO: 2935 - DNA, 22 bp, Homo Sapiens
atccgacattgaagttgactta

SEQ ID NO: 2936 - DNA, 22 bp, Homo Sapiens
tccgacattgaagttgacttac

SEQ ID NO: 2937 - DNA, 22 bp, Homo Sapiens
ccgacattgaagttgacttact

SEQ ID NO: 2938 - DNA, 22 bp, Homo Sapiens
cgacattgaagttgacttactg

SEQ ID NO: 2939 - DNA, 22 bp, Homo Sapiens
gacattgaagttgacttactga

SEQ ID NO: 2940 - DNA, 22 bp, Homo Sapiens
acattgaagttgacttactgaa

SEQ ID NO: 2941 - DNA, 22 bp, Homo Sapiens
cattgaagttgacttactgaag

SEQ ID NO: 2942 - DNA, 22 bp, Homo Sapiens
attgaagttgacttactgaaga

SEQ ID NO: 2943 - DNA, 22 bp, Homo Sapiens
ttgaagttgacttactgaagaa

SEQ ID NO: 2944 - DNA, 22 bp, Homo Sapiens
tgaagttgacttactgaagaat

SEQ ID NO: 2945 - DNA, 22 bp, Homo Sapiens
gaagttgacttactgaagaatg

SEQ ID NO: 2946 - DNA, 22 bp, Homo Sapiens
aagttgacttactgaagaatgg

SEQ ID NO: 2947 - DNA, 22 bp, Homo Sapiens
agttgacttactgaagaatgga

SEQ ID NO: 2948 - DNA, 22 bp, Homo Sapiens
gttgacttactgaagaatggag

SEQ ID NO: 2949 - DNA, 22 bp, Homo Sapiens
ttgacttactgaagaatggaga

SEQ ID NO: 2950 - DNA, 22 bp, Homo Sapiens
tgacttactgaagaatggagag

SEQ ID NO: 2951 - DNA, 22 bp, Homo Sapiens
gacttactgaagaatggagaga

SEQ ID NO: 2952 - DNA, 22 bp, Homo Sapiens
acttactgaagaatggagagag

SEQ ID NO: 2953 - DNA, 22 bp, Homo Sapiens
cttactgaagaatggagagaga

SEQ ID NO: 2954 - DNA, 22 bp, Homo Sapiens
ttactgaagaatggagagagaa

SEQ ID NO: 2955 - DNA, 22 bp, Homo Sapiens
tactgaagaatggagagagaat

SEQ ID NO: 2956 - DNA, 22 bp, Homo Sapiens
actgaagaatggagagagaatt

SEQ ID NO: 2957 - DNA, 22 bp, Homo Sapiens
ctgaagaatggagagagaattg

SEQ ID NO: 2958 - DNA, 22 bp, Homo Sapiens
tgaagaatggagagagaattga

SEQ ID NO: 2959 - DNA, 22 bp, Homo Sapiens
gaagaatggagagagaattgaa

SEQ ID NO: 2960 - DNA, 22 bp, Homo Sapiens
aagaatggagagagaattgaaa

SEQ ID NO: 2961 - DNA, 22 bp, Homo Sapiens
aaagtggagcattcagacttgt

SEQ ID NO: 2962 - DNA, 22 bp, Homo Sapiens
aagtggagcattcagacttgtc

SEQ ID NO: 2963 - DNA, 22 bp, Homo Sapiens
agtggagcattcagacttgtct

SEQ ID NO: 2964 - DNA, 22 bp, Homo Sapiens
gtggagcattcagacttgtctt

SEQ ID NO: 2965 - DNA, 22 bp, Homo Sapiens
tggagcattcagacttgtcttt

SEQ ID NO: 2966 - DNA, 22 bp, Homo Sapiens
ggagcattcagacttgtctttc

SEQ ID NO: 2967 - DNA, 22 bp, Homo Sapiens
gagcattcagacttgtctttca

SEQ ID NO: 2968 - DNA, 22 bp, Homo Sapiens
agcattcagacttgtctttcag

SEQ ID NO: 2969 - DNA, 22 bp, Homo Sapiens
gcattcagacttgtctttcagc

SEQ ID NO: 2970 - DNA, 22 bp, Homo Sapiens
cattcagacttgtctttcagca

SEQ ID NO: 2971 - DNA, 22 bp, Homo Sapiens
attcagacttgtctttcagcaa

SEQ ID NO: 2972 - DNA, 22 bp, Homo Sapiens
ttcagacttgtctttcagcaag

SEQ ID NO: 2973 - DNA, 22 bp, Homo Sapiens
tcagacttgtctttcagcaagg

SEQ ID NO: 2974 - DNA, 22 bp, Homo Sapiens
cagacttgtctttcagcaagga

SEQ ID NO: 2975 - DNA, 22 bp, Homo Sapiens
agacttgtctttcagcaaggac

SEQ ID NO: 2976 - DNA, 22 bp, Homo Sapiens
gacttgtctttcagcaaggact

SEQ ID NO: 2977 - DNA, 22 bp, Homo Sapiens
acttgtctttcagcaaggactg

SEQ ID NO: 2978 - DNA, 22 bp, Homo Sapiens
cttgtctttcagcaaggactgg

SEQ ID NO: 2979 - DNA, 22 bp, Homo Sapiens
ttgtctttcagcaaggactggt

SEQ ID NO: 2980 - DNA, 22 bp, Homo Sapiens
tgtctttcagcaaggactggtc

SEQ ID NO: 2981 - DNA, 22 bp, Homo Sapiens
gtctttcagcaaggactggtct

SEQ ID NO: 2982 - DNA, 22 bp, Homo Sapiens
tctttcagcaaggactggtctt

SEQ ID NO: 2983 - DNA, 22 bp, Homo Sapiens
ctttcagcaaggactggtcttt

SEQ ID NO: 2984 - DNA, 22 bp, Homo Sapiens
tttcagcaaggactggtctttc

SEQ ID NO: 2985 - DNA, 22 bp, Homo Sapiens
ttcagcaaggactggtctttct

SEQ ID NO: 2986 - DNA, 22 bp, Homo Sapiens
tcagcaaggactggtctttcta

SEQ ID NO: 2987 - DNA, 22 bp, Homo Sapiens
cagcaaggactggtctttctat

SEQ ID NO: 2988 - DNA, 22 bp, Homo Sapiens
agcaaggactggtctttctatc

SEQ ID NO: 2989 - DNA, 22 bp, Homo Sapiens
gcaaggactggtctttctatct

SEQ ID NO: 2990 - DNA, 22 bp, Homo Sapiens
caaggactggtctttctatctc

SEQ ID NO: 2991 - DNA, 22 bp, Homo Sapiens
aaggactggtctttctatctct

SEQ ID NO: 2992 - DNA, 22 bp, Homo Sapiens
aggactggtctttctatctctt

SEQ ID NO: 2993 - DNA, 22 bp, Homo Sapiens
ggactggtctttctatctcttg

SEQ ID NO: 2994 - DNA, 22 bp, Homo Sapiens
gactggtctttctatctcttgt

SEQ ID NO: 2995 - DNA, 22 bp, Homo Sapiens
actggtctttctatctcttgta

SEQ ID NO: 2996 - DNA, 22 bp, Homo Sapiens
ctggtctttctatctcttgtac

SEQ ID NO: 2997 - DNA, 22 bp, Homo Sapiens
tggtctttctatctcttgtact

SEQ ID NO: 2998 - DNA, 22 bp, Homo Sapiens
ggtctttctatctcttgtacta

SEQ ID NO: 2999 - DNA, 22 bp, Homo Sapiens
gtctttctatctcttgtactac

SEQ ID NO: 3000 - DNA, 22 bp, Homo Sapiens
tctttctatctcttgtactaca

SEQ ID NO: 3001 - DNA, 22 bp, Homo Sapiens
ctttctatctcttgtactacac

SEQ ID NO: 3002 - DNA, 22 bp, Homo Sapiens
tttctatctcttgtactacact

SEQ ID NO: 3003 - DNA, 22 bp, Homo Sapiens
ttctatctcttgtactacactg

SEQ ID NO: 3004 - DNA, 22 bp, Homo Sapiens
tctatctcttgtactacactga

SEQ ID NO: 3005 - DNA, 22 bp, Homo Sapiens
ctatctcttgtactacactgaa

SEQ ID NO: 3006 - DNA, 22 bp, Homo Sapiens
tatctcttgtactacactgaat

SEQ ID NO: 3007 - DNA, 22 bp, Homo Sapiens
atctcttgtactacactgaatt

SEQ ID NO: 3008 - DNA, 22 bp, Homo Sapiens
tctcttgtactacactgaattc

SEQ ID NO: 3009 - DNA, 22 bp, Homo Sapiens
ctcttgtactacactgaattca

SEQ ID NO: 3010 - DNA, 22 bp, Homo Sapiens
tcttgtactacactgaattcac

SEQ ID NO: 3011 - DNA, 22 bp, Homo Sapiens
cttgtactacactgaattcacc

SEQ ID NO: 3012 - DNA, 22 bp, Homo Sapiens
ttgtactacactgaattcaccc

SEQ ID NO: 3013 - DNA, 22 bp, Homo Sapiens
aaagatgagtatgcctgccgtg

SEQ ID NO: 3014 - DNA, 22 bp, Homo Sapiens
aagatgagtatgcctgccgtgt

SEQ ID NO: 3015 - DNA, 22 bp, Homo Sapiens
agatgagtatgcctgccgtgtg

SEQ ID NO: 3016 - DNA, 22 bp, Homo Sapiens
gatgagtatgcctgccgtgtga

SEQ ID NO: 3017 - DNA, 22 bp, Homo Sapiens
atgagtatgcctgccgtgtgaa

SEQ ID NO: 3018 - DNA, 22 bp, Homo Sapiens
tgagtatgcctgccgtgtgaac

SEQ ID NO: 3019 - DNA, 22 bp, Homo Sapiens
gagtatgcctgccgtgtgaacc

SEQ ID NO: 3020 - DNA, 22 bp, Homo Sapiens
agtatgcctgccgtgtgaacca

SEQ ID NO: 3021 - DNA, 22 bp, Homo Sapiens
gtatgcctgccgtgtgaaccat

SEQ ID NO: 3022 - DNA, 22 bp, Homo Sapiens
tatgcctgccgtgtgaaccatg

SEQ ID NO: 3023 - DNA, 22 bp, Homo Sapiens
atgcctgccgtgtgaaccatgt

SEQ ID NO: 3024 - DNA, 22 bp, Homo Sapiens
tgcctgccgtgtgaaccatgtg

SEQ ID NO: 3025 - DNA, 22 bp, Homo Sapiens
gcctgccgtgtgaaccatgtga

SEQ ID NO: 3026 - DNA, 22 bp, Homo Sapiens
cctgccgtgtgaaccatgtgac

SEQ ID NO: 3027 - DNA, 22 bp, Homo Sapiens
ctgccgtgtgaaccatgtgact

SEQ ID NO: 3028 - DNA, 22 bp, Homo Sapiens
tgccgtgtgaaccatgtgactt

SEQ ID NO: 3029 - DNA, 22 bp, Homo Sapiens
gccgtgtgaaccatgtgacttt

SEQ ID NO: 3030 - DNA, 22 bp, Homo Sapiens
ccgtgtgaaccatgtgactttg

SEQ ID NO: 3031 - DNA, 22 bp, Homo Sapiens
cgtgtgaaccatgtgactttgt

SEQ ID NO: 3032 - DNA, 22 bp, Homo Sapiens
gtgtgaaccatgtgactttgtc

SEQ ID NO: 3033 - DNA, 22 bp, Homo Sapiens
tgtgaaccatgtgactttgtca

SEQ ID NO: 3034 - DNA, 22 bp, Homo Sapiens
gtgaaccatgtgactttgtcac

SEQ ID NO: 3035 - DNA, 22 bp, Homo Sapiens
tgaaccatgtgactttgtcaca

SEQ ID NO: 3036 - DNA, 22 bp, Homo Sapiens
gaaccatgtgactttgtcacag

SEQ ID NO: 3037 - DNA, 22 bp, Homo Sapiens
aaccatgtgactttgtcacagc

SEQ ID NO: 3038 - DNA, 22 bp, Homo Sapiens
accatgtgactttgtcacagcc

SEQ ID NO: 3039 - DNA, 22 bp, Homo Sapiens
ccatgtgactttgtcacagccc

SEQ ID NO: 3040 - DNA, 22 bp, Homo Sapiens
catgtgactttgtcacagccca

SEQ ID NO: 3041 - DNA, 22 bp, Homo Sapiens
atgtgactttgtcacagcccaa

SEQ ID NO: 3042 - DNA, 22 bp, Homo Sapiens
tgtgactttgtcacagcccaag

SEQ ID NO: 3043 - DNA, 22 bp, Homo Sapiens
gtgactttgtcacagcccaaga

SEQ ID NO: 3044 - DNA, 22 bp, Homo Sapiens
tgactttgtcacagcccaagat

SEQ ID NO: 3045 - DNA, 22 bp, Homo Sapiens
gactttgtcacagcccaagata

SEQ ID NO: 3046 - DNA, 22 bp, Homo Sapiens
actttgtcacagcccaagatag

SEQ ID NO: 3047 - DNA, 22 bp, Homo Sapiens
ctttgtcacagcccaagatagt

SEQ ID NO: 3048 - DNA, 22 bp, Homo Sapiens
tttgtcacagcccaagatagtt

SEQ ID NO: 3049 - DNA, 22 bp, Homo Sapiens
ttgtcacagcccaagatagtta

SEQ ID NO: 3050 - DNA, 22 bp, Homo Sapiens
tgtcacagcccaagatagttaa

SEQ ID NO: 3051 - DNA, 22 bp, Homo Sapiens
gtcacagcccaagatagttaag

SEQ ID NO: 3052 - DNA, 22 bp, Homo Sapiens
tcacagcccaagatagttaagt

SEQ ID NO: 3053 - DNA, 22 bp, Homo Sapiens
cacagcccaagatagttaagtg

SEQ ID NO: 3054 - DNA, 22 bp, Homo Sapiens
acagcccaagatagttaagtgg

SEQ ID NO: 3055 - DNA, 22 bp, Homo Sapiens
cagcccaagatagttaagtggg

SEQ ID NO: 3056 - DNA, 22 bp, Homo Sapiens
agcccaagatagttaagtggga

SEQ ID NO: 3057 - DNA, 22 bp, Homo Sapiens
gcccaagatagttaagtgggat

SEQ ID NO: 3058 - DNA, 22 bp, Homo Sapiens
cccaagatagttaagtgggatc

SEQ ID NO: 3059 - DNA, 22 bp, Homo Sapiens
ccaagatagttaagtgggatcg

SEQ ID NO: 3060 - DNA, 22 bp, Homo Sapiens
caagatagttaagtgggatcga

SEQ ID NO: 3061 - DNA, 22 bp, Homo Sapiens
aagatagttaagtgggatcgag

SEQ ID NO: 3062 - DNA, 22 bp, Homo Sapiens
agatagttaagtgggatcgaga

SEQ ID NO: 3063 - DNA, 22 bp, Homo Sapiens
gatagttaagtgggatcgagac

SEQ ID NO: 3064 - DNA, 22 bp, Homo Sapiens
atagttaagtgggatcgagaca

SEQ ID NO: 3065 - DNA, 22 bp, Homo Sapiens
tagttaagtgggatcgagacat

SEQ ID NO: 3066 - DNA, 22 bp, Homo Sapiens
agttaagtgggatcgagacatg

SEQ ID NO: 3067 - DNA, 22 bp, Homo Sapiens
gttaagtgggatcgagacatgt

SEQ ID NO: 3068 - DNA, 22 bp, Homo Sapiens
ttaagtgggatcgagacatgta

SEQ ID NO: 3069 - DNA, 22 bp, Homo Sapiens
taagtgggatcgagacatgtaa

SEQ ID NO: 3070 - DNA, 22 bp, Homo Sapiens
aagtgggatcgagacatgtaag

SEQ ID NO: 3071 - DNA, 22 bp, Homo Sapiens
agtgggatcgagacatgtaagc

SEQ ID NO: 3072 - DNA, 22 bp, Homo Sapiens
gtgggatcgagacatgtaagca

SEQ ID NO: 3073 - DNA, 22 bp, Homo Sapiens
tgggatcgagacatgtaagcag

SEQ ID NO: 3074 - DNA, 22 bp, Homo Sapiens
gggatcgagacatgtaagcagc

SEQ ID NO: 3075 - DNA, 22 bp, Homo Sapiens
ggatcgagacatgtaagcagca

SEQ ID NO: 3076 - DNA, 22 bp, Homo Sapiens
gatcgagacatgtaagcagcat

SEQ ID NO: 3077 - DNA, 22 bp, Homo Sapiens
atcgagacatgtaagcagcatc

SEQ ID NO: 3078 - DNA, 22 bp, Homo Sapiens
tcgagacatgtaagcagcatca

SEQ ID NO: 3079 - DNA, 22 bp, Homo Sapiens
cgagacatgtaagcagcatcat

SEQ ID NO: 3080 - DNA, 22 bp, Homo Sapiens
gagacatgtaagcagcatcatg

SEQ ID NO: 3081 - DNA, 22 bp, Homo Sapiens
agacatgtaagcagcatcatgg

SEQ ID NO: 3082 - DNA, 22 bp, Homo Sapiens
gacatgtaagcagcatcatgga

SEQ ID NO: 3083 - DNA, 22 bp, Homo Sapiens
acatgtaagcagcatcatggag

SEQ ID NO: 3084 - DNA, 22 bp, Homo Sapiens
catgtaagcagcatcatggagg

SEQ ID NO: 3085 - DNA, 22 bp, Homo Sapiens
atgtaagcagcatcatggaggt

SEQ ID NO: 3086 - DNA, 22 bp, Homo Sapiens
tgtaagcagcatcatggaggtt

SEQ ID NO: 3087 - DNA, 22 bp, Homo Sapiens
gtaagcagcatcatggaggttt

SEQ ID NO: 3088 - DNA, 22 bp, Homo Sapiens
taagcagcatcatggaggtttg

SEQ ID NO: 3089 - DNA, 22 bp, Homo Sapiens
aagcagcatcatggaggtttga

SEQ ID NO: 3090 - DNA, 22 bp, Homo Sapiens
agcagcatcatggaggtttgaa

SEQ ID NO: 3091 - DNA, 22 bp, Homo Sapiens
gcagcatcatggaggtttgaag

SEQ ID NO: 3092 - DNA, 22 bp, Homo Sapiens
cagcatcatggaggtttgaaga

SEQ ID NO: 3093 - DNA, 22 bp, Homo Sapiens
agcatcatggaggtttgaagat

SEQ ID NO: 3094 - DNA, 22 bp, Homo Sapiens
gcatcatggaggtttgaagatg

SEQ ID NO: 3095 - DNA, 22 bp, Homo Sapiens
catcatggaggtttgaagatgc

SEQ ID NO: 3096 - DNA, 22 bp, Homo Sapiens
atcatggaggtttgaagatgcc

SEQ ID NO: 3097 - DNA, 22 bp, Homo Sapiens
tcatggaggtttgaagatgccg

SEQ ID NO: 3098 - DNA, 22 bp, Homo Sapiens
catggaggtttgaagatgccgc

SEQ ID NO: 3099 - DNA, 22 bp, Homo Sapiens
atggaggtttgaagatgccgca

SEQ ID NO: 3100 - DNA, 22 bp, Homo Sapiens
tggaggtttgaagatgccgcat

SEQ ID NO: 3101 - DNA, 22 bp, Homo Sapiens
ggaggtttgaagatgccgcatt

SEQ ID NO: 3102 - DNA, 22 bp, Homo Sapiens
gaggtttgaagatgccgcattt

SEQ ID NO: 3103 - DNA, 22 bp, Homo Sapiens
aggtttgaagatgccgcatttg

SEQ ID NO: 3104 - DNA, 22 bp, Homo Sapiens
ggtttgaagatgccgcatttgg

SEQ ID NO: 3105 - DNA, 22 bp, Homo Sapiens
gtttgaagatgccgcatttgga

SEQ ID NO: 3106 - DNA, 22 bp, Homo Sapiens
tttgaagatgccgcatttggat

SEQ ID NO: 3107 - DNA, 22 bp, Homo Sapiens
ttgaagatgccgcatttggatt

SEQ ID NO: 3108 - DNA, 22 bp, Homo Sapiens
tgaagatgccgcatttggattg

SEQ ID NO: 3109 - DNA, 22 bp, Homo Sapiens
gaagatgccgcatttggattgg

SEQ ID NO: 3110 - DNA, 22 bp, Homo Sapiens
aagatgccgcatttggattgga

SEQ ID NO: 3111 - DNA, 22 bp, Homo Sapiens
agatgccgcatttggattggat

SEQ ID NO: 3112 - DNA, 22 bp, Homo Sapiens
gatgccgcatttggattggatg

SEQ ID NO: 3113 - DNA, 22 bp, Homo Sapiens
atgccgcatttggattggatga

SEQ ID NO: 3114 - DNA, 22 bp, Homo Sapiens
tgccgcatttggattggatgaa

SEQ ID NO: 3115 - DNA, 22 bp, Homo Sapiens
gccgcatttggattggatgaat

SEQ ID NO: 3116 - DNA, 22 bp, Homo Sapiens
ccgcatttggattggatgaatt

SEQ ID NO: 3117 - DNA, 22 bp, Homo Sapiens
cgcatttggattggatgaattc

SEQ ID NO: 3118 - DNA, 22 bp, Homo Sapiens
gcatttggattggatgaattcc

SEQ ID NO: 3119 - DNA, 22 bp, Homo Sapiens
catttggattggatgaattcca

SEQ ID NO: 3120 - DNA, 22 bp, Homo Sapiens
atttggattggatgaattccaa

SEQ ID NO: 3121 - DNA, 22 bp, Homo Sapiens
tttggattggatgaattccaaa

SEQ ID NO: 3122 - DNA, 22 bp, Homo Sapiens
ttggattggatgaattccaaat

SEQ ID NO: 3123 - DNA, 22 bp, Homo Sapiens
tggattggatgaattccaaatt

SEQ ID NO: 3124 - DNA, 22 bp, Homo Sapiens
ggattggatgaattccaaattc

SEQ ID NO: 3125 - DNA, 22 bp, Homo Sapiens
gattggatgaattccaaattct

SEQ ID NO: 3126 - DNA, 22 bp, Homo Sapiens
attggatgaattccaaattctg

SEQ ID NO: 3127 - DNA, 22 bp, Homo Sapiens
ttggatgaattccaaattctgc

SEQ ID NO: 3128 - DNA, 22 bp, Homo Sapiens
tggatgaattccaaattctgct

SEQ ID NO: 3129 - DNA, 22 bp, Homo Sapiens
ggatgaattccaaattctgctt

SEQ ID NO: 3130 - DNA, 22 bp, Homo Sapiens
gatgaattccaaattctgcttg

SEQ ID NO: 3131 - DNA, 22 bp, Homo Sapiens
atgaattccaaattctgcttgc

SEQ ID NO: 3132 - DNA, 22 bp, Homo Sapiens
tgaattccaaattctgcttgct

SEQ ID NO: 3133 - DNA, 22 bp, Homo Sapiens
gaattccaaattctgcttgctt

SEQ ID NO: 3134 - DNA, 22 bp, Homo Sapiens
aattccaaattctgcttgcttg

SEQ ID NO: 3135 - DNA, 22 bp, Homo Sapiens
attccaaattctgcttgcttgc

SEQ ID NO: 3136 - DNA, 22 bp, Homo Sapiens
ttccaaattctgcttgcttgct

SEQ ID NO: 3137 - DNA, 22 bp, Homo Sapiens
tccaaattctgcttgcttgctt

SEQ ID NO: 3138 - DNA, 22 bp, Homo Sapiens
ccaaattctgcttgcttgcttt

SEQ ID NO: 3139 - DNA, 22 bp, Homo Sapiens
attgatatgcttatacacttac

SEQ ID NO: 3140 - DNA, 22 bp, Homo Sapiens
ttgatatgcttatacacttaca

SEQ ID NO: 3141 - DNA, 22 bp, Homo Sapiens
tgatatgcttatacacttacac

SEQ ID NO: 3142 - DNA, 22 bp, Homo Sapiens
gatatgcttatacacttacact

SEQ ID NO: 3143 - DNA, 22 bp, Homo Sapiens
atatgcttatacacttacactt

SEQ ID NO: 3144 - DNA, 22 bp, Homo Sapiens
tatgcttatacacttacacttt

SEQ ID NO: 3145 - DNA, 22 bp, Homo Sapiens
atgcttatacacttacacttta

SEQ ID NO: 3146 - DNA, 22 bp, Homo Sapiens
tgcttatacacttacactttat

SEQ ID NO: 3147 - DNA, 22 bp, Homo Sapiens
gcttatacacttacactttatg

SEQ ID NO: 3148 - DNA, 22 bp, Homo Sapiens
cttatacacttacactttatgc

SEQ ID NO: 3149 - DNA, 22 bp, Homo Sapiens
ttatacacttacactttatgca

SEQ ID NO: 3150 - DNA, 22 bp, Homo Sapiens
tatacacttacactttatgcac

SEQ ID NO: 3151 - DNA, 22 bp, Homo Sapiens
atacacttacactttatgcaca

SEQ ID NO: 3152 - DNA, 22 bp, Homo Sapiens
tacacttacactttatgcacaa

SEQ ID NO: 3153 - DNA, 22 bp, Homo Sapiens
acacttacactttatgcacaaa

SEQ ID NO: 3154 - DNA, 22 bp, Homo Sapiens
gtagggttataataatgttaac

SEQ ID NO: 3155 - DNA, 22 bp, Homo Sapiens
gggttataataatgttaacatg

SEQ ID NO: 3156 - DNA, 22 bp, Homo Sapiens
ggttataataatgttaacatgg

SEQ ID NO: 3157 - DNA, 22 bp, Homo Sapiens
taataatgttaacatggacatg

SEQ ID NO: 3158 - DNA, 22 bp, Homo Sapiens
aataatgttaacatggacatga

SEQ ID NO: 3159 - DNA, 22 bp, Homo Sapiens
ataatgttaacatggacatgat

SEQ ID NO: 3160 - DNA, 22 bp, Homo Sapiens
taatgttaacatggacatgatc

SEQ ID NO: 3161 - DNA, 22 bp, Homo Sapiens
aatgttaacatggacatgatct

SEQ ID NO: 3162 - DNA, 22 bp, Homo Sapiens
atgttaacatggacatgatctt

SEQ ID NO: 3163 - DNA, 22 bp, Homo Sapiens
tgttaacatggacatgatcttc

SEQ ID NO: 3164 - DNA, 22 bp, Homo Sapiens
gttaacatggacatgatcttct

SEQ ID NO: 3165 - DNA, 22 bp, Homo Sapiens
ttaacatggacatgatcttctt

SEQ ID NO: 3166 - DNA, 22 bp, Homo Sapiens
taacatggacatgatcttcttt

SEQ ID NO: 3167 - DNA, 22 bp, Homo Sapiens
aacatggacatgatcttcttta

SEQ ID NO: 3168 - DNA, 22 bp, Homo Sapiens
acatggacatgatcttctttat

SEQ ID NO: 3169 - DNA, 22 bp, Homo Sapiens
catggacatgatcttctttata

SEQ ID NO: 3170 - DNA, 22 bp, Homo Sapiens
atggacatgatcttctttataa

SEQ ID NO: 3171 - DNA, 22 bp, Homo Sapiens
tggacatgatcttctttataat

SEQ ID NO: 3172 - DNA, 22 bp, Homo Sapiens
ggacatgatcttctttataatt

SEQ ID NO: 3173 - DNA, 22 bp, Homo Sapiens
gacatgatcttctttataattc

SEQ ID NO: 3174 - DNA, 22 bp, Homo Sapiens
ctttataattctactttgagtg

SEQ ID NO: 3175 - DNA, 22 bp, Homo Sapiens
tttataattctactttgagtgc

SEQ ID NO: 3176 - DNA, 22 bp, Homo Sapiens
ttataattctactttgagtgct

SEQ ID NO: 3177 - DNA, 22 bp, Homo Sapiens
tataattctactttgagtgctg

SEQ ID NO: 3178 - DNA, 22 bp, Homo Sapiens
ataattctactttgagtgctgt

SEQ ID NO: 3179 - DNA, 22 bp, Homo Sapiens
taattctactttgagtgctgtc

SEQ ID NO: 3180 - DNA, 22 bp, Homo Sapiens
aattctactttgagtgctgtct

SEQ ID NO: 3181 - DNA, 22 bp, Homo Sapiens
attctactttgagtgctgtctc

SEQ ID NO: 3182 - DNA, 22 bp, Homo Sapiens
ttctactttgagtgctgtctcc

SEQ ID NO: 3183 - DNA, 22 bp, Homo Sapiens
tctactttgagtgctgtctcca

SEQ ID NO: 3184 - DNA, 22 bp, Homo Sapiens
ctactttgagtgctgtctccat

SEQ ID NO: 3185 - DNA, 22 bp, Homo Sapiens
tactttgagtgctgtctccatg

SEQ ID NO: 3186 - DNA, 22 bp, Homo Sapiens
actttgagtgctgtctccatgt

SEQ ID NO: 3187 - DNA, 22 bp, Homo Sapiens
ctttgagtgctgtctccatgtt

SEQ ID NO: 3188 - DNA, 22 bp, Homo Sapiens
tttgagtgctgtctccatgttt

SEQ ID NO: 3189 - DNA, 22 bp, Homo Sapiens
ttgagtgctgtctccatgtttg

SEQ ID NO: 3190 - DNA, 22 bp, Homo Sapiens
tgagtgctgtctccatgtttga

SEQ ID NO: 3191 - DNA, 22 bp, Homo Sapiens
gagtgctgtctccatgtttgat

SEQ ID NO: 3192 - DNA, 22 bp, Homo Sapiens
agtgctgtctccatgtttgatg

SEQ ID NO: 3193 - DNA, 22 bp, Homo Sapiens
gtgctgtctccatgtttgatgt

SEQ ID NO: 3194 - DNA, 22 bp, Homo Sapiens
tgctgtctccatgtttgatgta

SEQ ID NO: 3195 - DNA, 22 bp, Homo Sapiens
gctgtctccatgtttgatgtat

SEQ ID NO: 3196 - DNA, 22 bp, Homo Sapiens
ctgtctccatgtttgatgtatc

SEQ ID NO: 3197 - DNA, 22 bp, Homo Sapiens
tgtctccatgtttgatgtatct

SEQ ID NO: 3198 - DNA, 22 bp, Homo Sapiens
gtctccatgtttgatgtatctg

SEQ ID NO: 3199 - DNA, 22 bp, Homo Sapiens
tctccatgtttgatgtatctga

SEQ ID NO: 3200 - DNA, 22 bp, Homo Sapiens
ctccatgtttgatgtatctgag

SEQ ID NO: 3201 - DNA, 22 bp, Homo Sapiens
tccatgtttgatgtatctgagc

SEQ ID NO: 3202 - DNA, 22 bp, Homo Sapiens
ccatgtttgatgtatctgagca

SEQ ID NO: 3203 - DNA, 22 bp, Homo Sapiens
catgtttgatgtatctgagcag

SEQ ID NO: 3204 - DNA, 22 bp, Homo Sapiens
atgtttgatgtatctgagcagg

SEQ ID NO: 3205 - DNA, 22 bp, Homo Sapiens
tgtttgatgtatctgagcaggt

SEQ ID NO: 3206 - DNA, 22 bp, Homo Sapiens
gtttgatgtatctgagcaggtt

SEQ ID NO: 3207 - DNA, 22 bp, Homo Sapiens
tttgatgtatctgagcaggttg

SEQ ID NO: 3208 - DNA, 22 bp, Homo Sapiens
ttgatgtatctgagcaggttgc

SEQ ID NO: 3209 - DNA, 22 bp, Homo Sapiens
tgatgtatctgagcaggttgct

SEQ ID NO: 3210 - DNA, 22 bp, Homo Sapiens
gatgtatctgagcaggttgctc

SEQ ID NO: 3211 - DNA, 22 bp, Homo Sapiens
atgtatctgagcaggttgctcc

SEQ ID NO: 3212 - DNA, 22 bp, Homo Sapiens
tgtatctgagcaggttgctcca

SEQ ID NO: 3213 - DNA, 22 bp, Homo Sapiens
gtatctgagcaggttgctccac

SEQ ID NO: 3214 - DNA, 22 bp, Homo Sapiens
tatctgagcaggttgctccaca

SEQ ID NO: 3215 - DNA, 22 bp, Homo Sapiens
atctgagcaggttgctccacag

SEQ ID NO: 3216 - DNA, 22 bp, Homo Sapiens
tctgagcaggttgctccacagg

SEQ ID NO: 3217 - DNA, 22 bp, Homo Sapiens
ctgagcaggttgctccacaggt

SEQ ID NO: 3218 - DNA, 22 bp, Homo Sapiens
tgagcaggttgctccacaggta

SEQ ID NO: 3219 - DNA, 22 bp, Homo Sapiens
gagcaggttgctccacaggtag

SEQ ID NO: 3220 - DNA, 22 bp, Homo Sapiens
agcaggttgctccacaggtagc

SEQ ID NO: 3221 - DNA, 22 bp, Homo Sapiens
gcaggttgctccacaggtagct

SEQ ID NO: 3222 - DNA, 22 bp, Homo Sapiens
caggttgctccacaggtagctc

SEQ ID NO: 3223 - DNA, 22 bp, Homo Sapiens
aggttgctccacaggtagctct

SEQ ID NO: 3224 - DNA, 22 bp, Homo Sapiens
ggttgctccacaggtagctcta

SEQ ID NO: 3225 - DNA, 22 bp, Homo Sapiens
gttgctccacaggtagctctag

SEQ ID NO: 3226 - DNA, 22 bp, Homo Sapiens
ttgctccacaggtagctctagg

SEQ ID NO: 3227 - DNA, 22 bp, Homo Sapiens
tgctccacaggtagctctagga

SEQ ID NO: 3228 - DNA, 22 bp, Homo Sapiens
gctccacaggtagctctaggag

SEQ ID NO: 3229 - DNA, 22 bp, Homo Sapiens
ctccacaggtagctctaggagg

SEQ ID NO: 3230 - DNA, 22 bp, Homo Sapiens
tccacaggtagctctaggaggg

SEQ ID NO: 3231 - DNA, 22 bp, Homo Sapiens
cacaggtagctctaggagggct

SEQ ID NO: 3232 - DNA, 22 bp, Homo Sapiens
acaggtagctctaggagggctg

SEQ ID NO: 3233 - DNA, 22 bp, Homo Sapiens
gtagctctaggagggctggcaa

SEQ ID NO: 3234 - DNA, 22 bp, Homo Sapiens
tagctctaggagggctggcaac

SEQ ID NO: 3235 - DNA, 22 bp, Homo Sapiens
agctctaggagggctggcaact

SEQ ID NO: 3236 - DNA, 22 bp, Homo Sapiens
gctctaggagggctggcaactt

SEQ ID NO: 3237 - DNA, 22 bp, Homo Sapiens
ctctaggagggctggcaactta

SEQ ID NO: 3238 - DNA, 22 bp, Homo Sapiens
tctaggagggctggcaacttag

SEQ ID NO: 3239 - DNA, 22 bp, Homo Sapiens
ctaggagggctggcaacttaga

SEQ ID NO: 3240 - DNA, 22 bp, Homo Sapiens
taggagggctggcaacttagag

SEQ ID NO: 3241 - DNA, 22 bp, Homo Sapiens
aggagggctggcaacttagagg

SEQ ID NO: 3242 - DNA, 22 bp, Homo Sapiens
ggagggctggcaacttagaggt

SEQ ID NO: 3243 - DNA, 22 bp, Homo Sapiens
gagggctggcaacttagaggtg

SEQ ID NO: 3244 - DNA, 22 bp, Homo Sapiens
agggctggcaacttagaggtgg

SEQ ID NO: 3245 - DNA, 22 bp, Homo Sapiens
gggagcagagaattctcttatc

SEQ ID NO: 3246 - DNA, 22 bp, Homo Sapiens
ggagcagagaattctcttatcc

SEQ ID NO: 3247 - DNA, 22 bp, Homo Sapiens
gagcagagaattctcttatcca

SEQ ID NO: 3248 - DNA, 22 bp, Homo Sapiens
agcagagaattctcttatccaa

SEQ ID NO: 3249 - DNA, 22 bp, Homo Sapiens
gcagagaattctcttatccaac

SEQ ID NO: 3250 - DNA, 22 bp, Homo Sapiens
cagagaattctcttatccaaca

SEQ ID NO: 3251 - DNA, 22 bp, Homo Sapiens
agagaattctcttatccaacat

SEQ ID NO: 3252 - DNA, 22 bp, Homo Sapiens
gagaattctcttatccaacatc

SEQ ID NO: 3253 - DNA, 22 bp, Homo Sapiens
agaattctcttatccaacatca

SEQ ID NO: 3254 - DNA, 22 bp, Homo Sapiens
gaattctcttatccaacatcaa

SEQ ID NO: 3255 - DNA, 22 bp, Homo Sapiens
aattctcttatccaacatcaac

SEQ ID NO: 3256 - DNA, 22 bp, Homo Sapiens
attctcttatccaacatcaaca

SEQ ID NO: 3257 - DNA, 22 bp, Homo Sapiens
ttctcttatccaacatcaacat

SEQ ID NO: 3258 - DNA, 22 bp, Homo Sapiens
tctcttatccaacatcaacatc

SEQ ID NO: 3259 - DNA, 22 bp, Homo Sapiens
ctcttatccaacatcaacatct

SEQ ID NO: 3260 - DNA, 22 bp, Homo Sapiens
tcttatccaacatcaacatctt

SEQ ID NO: 3261 - DNA, 22 bp, Homo Sapiens
cttatccaacatcaacatcttg

SEQ ID NO: 3262 - DNA, 22 bp, Homo Sapiens
ttatccaacatcaacatcttgg

SEQ ID NO: 3263 - DNA, 22 bp, Homo Sapiens
tatccaacatcaacatcttggt

SEQ ID NO: 3264 - DNA, 22 bp, Homo Sapiens
atccaacatcaacatcttggtc

SEQ ID NO: 3265 - DNA, 22 bp, Homo Sapiens
tccaacatcaacatcttggtca

SEQ ID NO: 3266 - DNA, 22 bp, Homo Sapiens
ccaacatcaacatcttggtcag

SEQ ID NO: 3267 - DNA, 22 bp, Homo Sapiens
caacatcaacatcttggtcaga

SEQ ID NO: 3268 - DNA, 22 bp, Homo Sapiens
aacatcaacatcttggtcagat

SEQ ID NO: 3269 - DNA, 22 bp, Homo Sapiens
acatcaacatcttggtcagatt

SEQ ID NO: 3270 - DNA, 22 bp, Homo Sapiens
catcaacatcttggtcagattt

SEQ ID NO: 3271 - DNA, 22 bp, Homo Sapiens
atcaacatcttggtcagatttg

SEQ ID NO: 3272 - DNA, 22 bp, Homo Sapiens
tcaacatcttggtcagatttga

SEQ ID NO: 3273 - DNA, 22 bp, Homo Sapiens
caacatcttggtcagatttgaa

SEQ ID NO: 3274 - DNA, 22 bp, Homo Sapiens
aacatcttggtcagatttgaac

SEQ ID NO: 3275 - DNA, 22 bp, Homo Sapiens
acatcttggtcagatttgaact

SEQ ID NO: 3276 - DNA, 22 bp, Homo Sapiens
catcttggtcagatttgaactc

SEQ ID NO: 3277 - DNA, 22 bp, Homo Sapiens
atcttggtcagatttgaactct

SEQ ID NO: 3278 - DNA, 22 bp, Homo Sapiens
tcttggtcagatttgaactctt

SEQ ID NO: 3279 - DNA, 22 bp, Homo Sapiens
cttggtcagatttgaactcttc

SEQ ID NO: 3280 - DNA, 22 bp, Homo Sapiens
ttggtcagatttgaactcttca

SEQ ID NO: 3281 - DNA, 22 bp, Homo Sapiens
tggtcagatttgaactcttcaa

SEQ ID NO: 3282 - DNA, 22 bp, Homo Sapiens
ggtcagatttgaactcttcaat

SEQ ID NO: 3283 - DNA, 22 bp, Homo Sapiens
gtcagatttgaactcttcaatc

SEQ ID NO: 3284 - DNA, 22 bp, Homo Sapiens
tcagatttgaactcttcaatct

SEQ ID NO: 3285 - DNA, 22 bp, Homo Sapiens
cagatttgaactcttcaatctc

SEQ ID NO: 3286 - DNA, 22 bp, Homo Sapiens
agatttgaactcttcaatctct

SEQ ID NO: 3287 - DNA, 22 bp, Homo Sapiens
gatttgaactcttcaatctctt

SEQ ID NO: 3288 - DNA, 22 bp, Homo Sapiens
atttgaactcttcaatctcttg

SEQ ID NO: 3289 - DNA, 22 bp, Homo Sapiens
tttgaactcttcaatctcttgc

SEQ ID NO: 3290 - DNA, 22 bp, Homo Sapiens
ttgaactcttcaatctcttgca

SEQ ID NO: 3291 - DNA, 22 bp, Homo Sapiens
tgaactcttcaatctcttgcac

SEQ ID NO: 3292 - DNA, 22 bp, Homo Sapiens
gaactcttcaatctcttgcact

SEQ ID NO: 3293 - DNA, 22 bp, Homo Sapiens
aactcttcaatctcttgcactc

SEQ ID NO: 3294 - DNA, 22 bp, Homo Sapiens
actcttcaatctcttgcactca

SEQ ID NO: 3295 - DNA, 22 bp, Homo Sapiens
ctcttcaatctcttgcactcaa

SEQ ID NO: 3296 - DNA, 22 bp, Homo Sapiens
tcttcaatctcttgcactcaaa

SEQ ID NO: 3297 - DNA, 22 bp, Homo Sapiens
cttcaatctcttgcactcaaag

SEQ ID NO: 3298 - DNA, 22 bp, Homo Sapiens
ttcaatctcttgcactcaaagc

SEQ ID NO: 3299 - DNA, 22 bp, Homo Sapiens
tcaatctcttgcactcaaagct

SEQ ID NO: 3300 - DNA, 22 bp, Homo Sapiens
caatctcttgcactcaaagctt

SEQ ID NO: 3301 - DNA, 22 bp, Homo Sapiens
aatctcttgcactcaaagcttg

SEQ ID NO: 3302 - DNA, 22 bp, Homo Sapiens
atctcttgcactcaaagcttgt

SEQ ID NO: 3303 - DNA, 22 bp, Homo Sapiens
tctcttgcactcaaagcttgtt

SEQ ID NO: 3304 - DNA, 22 bp, Homo Sapiens
ctcttgcactcaaagcttgtta

SEQ ID NO: 3305 - DNA, 22 bp, Homo Sapiens
tcttgcactcaaagcttgttaa

SEQ ID NO: 3306 - DNA, 22 bp, Homo Sapiens
cttgcactcaaagcttgttaag

SEQ ID NO: 3307 - DNA, 22 bp, Homo Sapiens
ttgcactcaaagcttgttaaga

SEQ ID NO: 3308 - DNA, 22 bp, Homo Sapiens
tgcactcaaagcttgttaagat

SEQ ID NO: 3309 - DNA, 22 bp, Homo Sapiens
gcactcaaagcttgttaagata

SEQ ID NO: 3310 - DNA, 22 bp, Homo Sapiens
cactcaaagcttgttaagatag

SEQ ID NO: 3311 - DNA, 22 bp, Homo Sapiens
actcaaagcttgttaagatagt

SEQ ID NO: 3312 - DNA, 22 bp, Homo Sapiens
ctcaaagcttgttaagatagtt

SEQ ID NO: 3313 - DNA, 22 bp, Homo Sapiens
tcaaagcttgttaagatagtta

SEQ ID NO: 3314 - DNA, 22 bp, Homo Sapiens
caaagcttgttaagatagttaa

SEQ ID NO: 3315 - DNA, 22 bp, Homo Sapiens
aaagcttgttaagatagttaag

SEQ ID NO: 3316 - DNA, 22 bp, Homo Sapiens
aagcttgttaagatagttaagc

SEQ ID NO: 3317 - DNA, 22 bp, Homo Sapiens
agcttgttaagatagttaagcg

SEQ ID NO: 3318 - DNA, 22 bp, Homo Sapiens
gcttgttaagatagttaagcgt

SEQ ID NO: 3319 - DNA, 22 bp, Homo Sapiens
cttgttaagatagttaagcgtg

SEQ ID NO: 3320 - DNA, 22 bp, Homo Sapiens
ttgttaagatagttaagcgtgc

SEQ ID NO: 3321 - DNA, 22 bp, Homo Sapiens
tgttaagatagttaagcgtgca

SEQ ID NO: 3322 - DNA, 22 bp, Homo Sapiens
gttaagatagttaagcgtgcat

SEQ ID NO: 3323 - DNA, 22 bp, Homo Sapiens
ttaagatagttaagcgtgcata

SEQ ID NO: 3324 - DNA, 22 bp, Homo Sapiens
taagatagttaagcgtgcataa

SEQ ID NO: 3325 - DNA, 22 bp, Homo Sapiens
aagatagttaagcgtgcataag

SEQ ID NO: 3326 - DNA, 22 bp, Homo Sapiens
agatagttaagcgtgcataagt

SEQ ID NO: 3327 - DNA, 22 bp, Homo Sapiens
gatagttaagcgtgcataagtt

SEQ ID NO: 3328 - DNA, 22 bp, Homo Sapiens
atagttaagcgtgcataagtta

SEQ ID NO: 3329 - DNA, 22 bp, Homo Sapiens
tagttaagcgtgcataagttaa

SEQ ID NO: 3330 - DNA, 22 bp, Homo Sapiens
agttaagcgtgcataagttaac

SEQ ID NO: 3331 - DNA, 22 bp, Homo Sapiens
gttaagcgtgcataagttaact

SEQ ID NO: 3332 - DNA, 22 bp, Homo Sapiens
ttaagcgtgcataagttaactt

SEQ ID NO: 3333 - DNA, 22 bp, Homo Sapiens
taagcgtgcataagttaacttc

SEQ ID NO: 3334 - DNA, 22 bp, Homo Sapiens
aagcgtgcataagttaacttcc

SEQ ID NO: 3335 - DNA, 22 bp, Homo Sapiens
agcgtgcataagttaacttcca

SEQ ID NO: 3336 - DNA, 22 bp, Homo Sapiens
gcgtgcataagttaacttccaa

SEQ ID NO: 3337 - DNA, 22 bp, Homo Sapiens
cgtgcataagttaacttccaat

SEQ ID NO: 3338 - DNA, 22 bp, Homo Sapiens
gtgcataagttaacttccaatt

SEQ ID NO: 3339 - DNA, 22 bp, Homo Sapiens
tgcataagttaacttccaattt

SEQ ID NO: 3340 - DNA, 22 bp, Homo Sapiens
gcataagttaacttccaattta

SEQ ID NO: 3341 - DNA, 22 bp, Homo Sapiens
cataagttaacttccaatttac

SEQ ID NO: 3342 - DNA, 22 bp, Homo Sapiens
agttaacttccaatttacatac

SEQ ID NO: 3343 - DNA, 22 bp, Homo Sapiens
gttaacttccaatttacatact

SEQ ID NO: 3344 - DNA, 22 bp, Homo Sapiens
ttaacttccaatttacatactc

SEQ ID NO: 3345 - DNA, 22 bp, Homo Sapiens
taacttccaatttacatactct

SEQ ID NO: 3346 - DNA, 22 bp, Homo Sapiens
aacttccaatttacatactctg

SEQ ID NO: 3347 - DNA, 22 bp, Homo Sapiens
acttccaatttacatactctgc

SEQ ID NO: 3348 - DNA, 22 bp, Homo Sapiens
cttccaatttacatactctgct

SEQ ID NO: 3349 - DNA, 22 bp, Homo Sapiens
ttccaatttacatactctgctt

SEQ ID NO: 3350 - DNA, 22 bp, Homo Sapiens
tccaatttacatactctgctta

SEQ ID NO: 3351 - DNA, 22 bp, Homo Sapiens
ccaatttacatactctgcttag

SEQ ID NO: 3352 - DNA, 22 bp, Homo Sapiens
caatttacatactctgcttaga

SEQ ID NO: 3353 - DNA, 22 bp, Homo Sapiens
aatttacatactctgcttagaa

SEQ ID NO: 3354 - DNA, 22 bp, Homo Sapiens
atttacatactctgcttagaat

SEQ ID NO: 3355 - DNA, 22 bp, Homo Sapiens
tttacatactctgcttagaatt

SEQ ID NO: 3356 - DNA, 22 bp, Homo Sapiens
ttacatactctgcttagaattt

SEQ ID NO: 3357 - DNA, 22 bp, Homo Sapiens
tacatactctgcttagaatttg

SEQ ID NO: 3358 - DNA, 22 bp, Homo Sapiens
acatactctgcttagaatttgg

SEQ ID NO: 3359 - DNA, 22 bp, Homo Sapiens
catactctgcttagaatttggg

SEQ ID NO: 3360 - DNA, 22 bp, Homo Sapiens
atataattgacaggattattgg

SEQ ID NO: 3361 - DNA, 22 bp, Homo Sapiens
tataattgacaggattattgga

SEQ ID NO: 3362 - DNA, 22 bp, Homo Sapiens
ataattgacaggattattggaa

SEQ ID NO: 3363 - DNA, 22 bp, Homo Sapiens
taattgacaggattattggaaa

SEQ ID NO: 3364 - DNA, 22 bp, Homo Sapiens
aattgacaggattattggaaat

SEQ ID NO: 3365 - DNA, 22 bp, Homo Sapiens
attgacaggattattggaaatt

SEQ ID NO: 3366 - DNA, 22 bp, Homo Sapiens
ttgacaggattattggaaattt

SEQ ID NO: 3367 - DNA, 22 bp, Homo Sapiens
tgacaggattattggaaatttg

SEQ ID NO: 3368 - DNA, 22 bp, Homo Sapiens
gacaggattattggaaatttgt

SEQ ID NO: 3369 - DNA, 22 bp, Homo Sapiens
acaggattattggaaatttgtt

SEQ ID NO: 3370 - DNA, 22 bp, Homo Sapiens
caggattattggaaatttgtta

SEQ ID NO: 3371 - DNA, 22 bp, Homo Sapiens
tatacatttgataaagtaaggc

SEQ ID NO: 3372 - DNA, 22 bp, Homo Sapiens
atacatttgataaagtaaggca

SEQ ID NO: 3373 - DNA, 22 bp, Homo Sapiens
tacatttgataaagtaaggcat

SEQ ID NO: 3374 - DNA, 22 bp, Homo Sapiens
acatttgataaagtaaggcatg

SEQ ID NO: 3375 - DNA, 22 bp, Homo Sapiens
catttgataaagtaaggcatgg

SEQ ID NO: 3376 - DNA, 22 bp, Homo Sapiens
atttgataaagtaaggcatggt

SEQ ID NO: 3377 - DNA, 22 bp, Homo Sapiens
tttgataaagtaaggcatggtt

SEQ ID NO: 3378 - DNA, 22 bp, Homo Sapiens
ttgataaagtaaggcatggttg

SEQ ID NO: 3379 - DNA, 22 bp, Homo Sapiens
tgataaagtaaggcatggttgt

SEQ ID NO: 3380 - DNA, 22 bp, Homo Sapiens
gataaagtaaggcatggttgtg

SEQ ID NO: 3381 - DNA, 22 bp, Homo Sapiens
ataaagtaaggcatggttgtgg

SEQ ID NO: 3382 - DNA, 22 bp, Homo Sapiens
taaagtaaggcatggttgtggt

SEQ ID NO: 3383 - DNA, 22 bp, Homo Sapiens
aaagtaaggcatggttgtggtt

SEQ ID NO: 3384 - DNA, 22 bp, Homo Sapiens
aagtaaggcatggttgtggtta

SEQ ID NO: 3385 - DNA, 22 bp, Homo Sapiens
agtaaggcatggttgtggttaa

SEQ ID NO: 3386 - DNA, 22 bp, Homo Sapiens
gtaaggcatggttgtggttaat

SEQ ID NO: 3387 - DNA, 22 bp, Homo Sapiens
taaggcatggttgtggttaatc

SEQ ID NO: 3388 - DNA, 22 bp, Homo Sapiens
aaggcatggttgtggttaatct

SEQ ID NO: 3389 - DNA, 22 bp, Homo Sapiens
aggcatggttgtggttaatctg

SEQ ID NO: 3390 - DNA, 22 bp, Homo Sapiens
ggcatggttgtggttaatctgg

SEQ ID NO: 3391 - DNA, 22 bp, Homo Sapiens
gcatggttgtggttaatctggt

SEQ ID NO: 3392 - DNA, 22 bp, Homo Sapiens
catggttgtggttaatctggtt

SEQ ID NO: 3393 - DNA, 22 bp, Homo Sapiens
atggttgtggttaatctggttt

SEQ ID NO: 3394 - DNA, 22 bp, Homo Sapiens
tggttgtggttaatctggttta

SEQ ID NO: 3395 - DNA, 22 bp, Homo Sapiens
ggttgtggttaatctggtttat

SEQ ID NO: 3396 - DNA, 22 bp, Homo Sapiens
gttgtggttaatctggtttatt

SEQ ID NO: 3397 - DNA, 22 bp, Homo Sapiens
ttgtggttaatctggtttattt

SEQ ID NO: 3398 - DNA, 22 bp, Homo Sapiens
tgttccacaagttaaataaatc

SEQ ID NO: 3399 - DNA, 22 bp, Homo Sapiens
gttccacaagttaaataaatca

SEQ ID NO: 3400 - DNA, 18 bp, Homo Sapiens
attcgggccgagatgtct

SEQ ID NO: 3401 - DNA, 18 bp, Homo Sapiens
tggagagagaattgaaaa

SEQ ID NO: 3402 - DNA, 18 bp, Homo Sapiens
ggagagagaattgaaaaa

SEQ ID NO: 3403 - DNA, 18 bp, Homo Sapiens
gagagagaattgaaaaag

SEQ ID NO: 3404 - DNA, 18 bp, Homo Sapiens
agagagaattgaaaaagt

SEQ ID NO: 3405 - DNA, 18 bp, Homo Sapiens
gagagaattgaaaaagtg

SEQ ID NO: 3406 - DNA, 18 bp, Homo Sapiens
agagaattgaaaaagtgg

SEQ ID NO: 3407 - DNA, 18 bp, Homo Sapiens
gagaattgaaaaagtgga

SEQ ID NO: 3408 - DNA, 18 bp, Homo Sapiens
agaattgaaaaagtggag

SEQ ID NO: 3409 - DNA, 18 bp, Homo Sapiens
gaattgaaaaagtggagc

SEQ ID NO: 3410 - DNA, 18 bp, Homo Sapiens
aattgaaaaagtggagca

SEQ ID NO: 3411 - DNA, 18 bp, Homo Sapiens
attgaaaaagtggagcat

SEQ ID NO: 3412 - DNA, 18 bp, Homo Sapiens
ttgaaaaagtggagcatt

SEQ ID NO: 3413 - DNA, 18 bp, Homo Sapiens
tgaaaaagtggagcattc

SEQ ID NO: 3414 - DNA, 18 bp, Homo Sapiens
gaaaaagtggagcattca

SEQ ID NO: 3415 - DNA, 18 bp, Homo Sapiens
aaaaagtggagcattcag

SEQ ID NO: 3416 - DNA, 18 bp, Homo Sapiens
aaaagtggagcattcaga

SEQ ID NO: 3417 - DNA, 18 bp, Homo Sapiens
ctacactgaattcacccc

SEQ ID NO: 3418 - DNA, 18 bp, Homo Sapiens
tacactgaattcaccccc

SEQ ID NO: 3419 - DNA, 18 bp, Homo Sapiens
acactgaattcaccccca

SEQ ID NO: 3420 - DNA, 18 bp, Homo Sapiens
cactgaattcacccccac

SEQ ID NO: 3421 - DNA, 18 bp, Homo Sapiens
actgaattcacccccact

SEQ ID NO: 3422 - DNA, 18 bp, Homo Sapiens
ctgaattcacccccactg

SEQ ID NO: 3423 - DNA, 18 bp, Homo Sapiens
tgaattcacccccactga

SEQ ID NO: 3424 - DNA, 18 bp, Homo Sapiens
gaattcacccccactgaa

SEQ ID NO: 3425 - DNA, 18 bp, Homo Sapiens
aattcacccccactgaaa

SEQ ID NO: 3426 - DNA, 18 bp, Homo Sapiens
attcacccccactgaaaa

SEQ ID NO: 3427 - DNA, 18 bp, Homo Sapiens
ttcacccccactgaaaaa

SEQ ID NO: 3428 - DNA, 18 bp, Homo Sapiens
tcacccccactgaaaaag

SEQ ID NO: 3429 - DNA, 18 bp, Homo Sapiens
cacccccactgaaaaaga

SEQ ID NO: 3430 - DNA, 18 bp, Homo Sapiens
acccccactgaaaaagat

SEQ ID NO: 3431 - DNA, 18 bp, Homo Sapiens
cccccactgaaaaagatg

SEQ ID NO: 3432 - DNA, 18 bp, Homo Sapiens
ccccactgaaaaagatga

SEQ ID NO: 3433 - DNA, 18 bp, Homo Sapiens
cccactgaaaaagatgag

SEQ ID NO: 3434 - DNA, 18 bp, Homo Sapiens
ccactgaaaaagatgagt

SEQ ID NO: 3435 - DNA, 18 bp, Homo Sapiens
cactgaaaaagatgagta

SEQ ID NO: 3436 - DNA, 18 bp, Homo Sapiens
actgaaaaagatgagtat

SEQ ID NO: 3437 - DNA, 18 bp, Homo Sapiens
ctgaaaaagatgagtatg

SEQ ID NO: 3438 - DNA, 18 bp, Homo Sapiens
tgaaaaagatgagtatgc

SEQ ID NO: 3439 - DNA, 18 bp, Homo Sapiens
gaaaaagatgagtatgcc

SEQ ID NO: 3440 - DNA, 18 bp, Homo Sapiens
aaaaagatgagtatgcct

SEQ ID NO: 3441 - DNA, 18 bp, Homo Sapiens
aaaagatgagtatgcctg

SEQ ID NO: 3442 - DNA, 18 bp, Homo Sapiens
ttctgcttgcttgctttt

SEQ ID NO: 3443 - DNA, 18 bp, Homo Sapiens
tctgcttgcttgcttttt

SEQ ID NO: 3444 - DNA, 18 bp, Homo Sapiens
ctgcttgcttgcttttta

SEQ ID NO: 3445 - DNA, 18 bp, Homo Sapiens
tgcttgcttgctttttaa

SEQ ID NO: 3446 - DNA, 18 bp, Homo Sapiens
gcttgcttgctttttaat

SEQ ID NO: 3447 - DNA, 18 bp, Homo Sapiens
cttgcttgctttttaata

SEQ ID NO: 3448 - DNA, 18 bp, Homo Sapiens
gcttgctttttaatattg

SEQ ID NO: 3449 - DNA, 18 bp, Homo Sapiens
tacactttatgcacaaaa

SEQ ID NO: 3450 - DNA, 18 bp, Homo Sapiens
acactttatgcacaaaat

SEQ ID NO: 3451 - DNA, 18 bp, Homo Sapiens
cactttatgcacaaaatg

SEQ ID NO: 3452 - DNA, 18 bp, Homo Sapiens
actttatgcacaaaatgt

SEQ ID NO: 3453 - DNA, 18 bp, Homo Sapiens
ctttatgcacaaaatgta

SEQ ID NO: 3454 - DNA, 18 bp, Homo Sapiens
tttatgcacaaaatgtag

SEQ ID NO: 3455 - DNA, 18 bp, Homo Sapiens
ttatgcacaaaatgtagg

SEQ ID NO: 3456 - DNA, 18 bp, Homo Sapiens
tatgcacaaaatgtaggg

SEQ ID NO: 3457 - DNA, 18 bp, Homo Sapiens
atgcacaaaatgtagggt

SEQ ID NO: 3458 - DNA, 18 bp, Homo Sapiens
tgcacaaaatgtagggtt

SEQ ID NO: 3459 - DNA, 18 bp, Homo Sapiens
gcacaaaatgtagggtta

SEQ ID NO: 3460 - DNA, 18 bp, Homo Sapiens
cacaaaatgtagggttat

SEQ ID NO: 3461 - DNA, 18 bp, Homo Sapiens
acaaaatgtagggttata

SEQ ID NO: 3462 - DNA, 18 bp, Homo Sapiens
caaaatgtagggttataa

SEQ ID NO: 3463 - DNA, 18 bp, Homo Sapiens
gcaacttagaggtgggga

SEQ ID NO: 3464 - DNA, 18 bp, Homo Sapiens
caacttagaggtggggag

SEQ ID NO: 3465 - DNA, 18 bp, Homo Sapiens
aacttagaggtggggagc

SEQ ID NO: 3466 - DNA, 18 bp, Homo Sapiens
acttagaggtggggagca

SEQ ID NO: 3467 - DNA, 18 bp, Homo Sapiens
ttagaggtggggagcaga

SEQ ID NO: 3468 - DNA, 18 bp, Homo Sapiens
aggtggggagcagagaat

SEQ ID NO: 3469 - DNA, 18 bp, Homo Sapiens
ggtggggagcagagaatt

SEQ ID NO: 3470 - DNA, 18 bp, Homo Sapiens
gtggggagcagagaattc

SEQ ID NO: 3471 - DNA, 18 bp, Homo Sapiens
tggggagcagagaattct

SEQ ID NO: 3472 - DNA, 18 bp, Homo Sapiens
ggggagcagagaattctc

SEQ ID NO: 3473 - DNA, 18 bp, Homo Sapiens
tctgcttagaatttgggg

SEQ ID NO: 3474 - DNA, 18 bp, Homo Sapiens
ctgcttagaatttggggg

SEQ ID NO: 3475 - DNA, 18 bp, Homo Sapiens
tgcttagaatttggggga

SEQ ID NO: 3476 - DNA, 18 bp, Homo Sapiens
gcttagaatttgggggaa

SEQ ID NO: 3477 - DNA, 18 bp, Homo Sapiens
cttagaatttgggggaaa

SEQ ID NO: 3478 - DNA, 18 bp, Homo Sapiens
ttagaatttgggggaaaa

SEQ ID NO: 3479 - DNA, 18 bp, Homo Sapiens
tagaatttgggggaaaat

SEQ ID NO: 3480 - DNA, 18 bp, Homo Sapiens
agaatttgggggaaaatt

SEQ ID NO: 3481 - DNA, 18 bp, Homo Sapiens
gaatttgggggaaaattt

SEQ ID NO: 3482 - DNA, 18 bp, Homo Sapiens
aatttgggggaaaattta

SEQ ID NO: 3483 - DNA, 18 bp, Homo Sapiens
atttgggggaaaatttag

SEQ ID NO: 3484 - DNA, 18 bp, Homo Sapiens
tttgggggaaaatttaga

SEQ ID NO: 3485 - DNA, 18 bp, Homo Sapiens
ttgggggaaaatttagaa

SEQ ID NO: 3486 - DNA, 18 bp, Homo Sapiens
tgggggaaaatttagaaa

SEQ ID NO: 3487 - DNA, 18 bp, Homo Sapiens
gggggaaaatttagaaat

SEQ ID NO: 3488 - DNA, 18 bp, Homo Sapiens
ggggaaaatttagaaata

SEQ ID NO: 3489 - DNA, 18 bp, Homo Sapiens
tgaatgaaacattttgtc

SEQ ID NO: 3490 - DNA, 18 bp, Homo Sapiens
gaatgaaacattttgtca

SEQ ID NO: 3491 - DNA, 18 bp, Homo Sapiens
tctggtttatttttgttc

SEQ ID NO: 3492 - DNA, 18 bp, Homo Sapiens
ctggtttatttttgttcc

SEQ ID NO: 3493 - DNA, 18 bp, Homo Sapiens
tggtttatttttgttcca

SEQ ID NO: 3494 - DNA, 18 bp, Homo Sapiens
ggtttatttttgttccac

SEQ ID NO: 3495 - DNA, 18 bp, Homo Sapiens
gtttatttttgttccaca

SEQ ID NO: 3496 - DNA, 18 bp, Homo Sapiens
ttatttttgttccacaag

SEQ ID NO: 3497 - DNA, 18 bp, Homo Sapiens
tatttttgttccacaagt

SEQ ID NO: 3498 - DNA, 18 bp, Homo Sapiens
atttttgttccacaagtt

SEQ ID NO: 3499 - DNA, 18 bp, Homo Sapiens
tttttgttccacaagtta

SEQ ID NO: 3500 - DNA, 18 bp, Homo Sapiens
ttttgttccacaagttaa

SEQ ID NO: 3501 - DNA, 19 bp, Homo Sapiens
acagcattcgggccgagat

SEQ ID NO: 3502 - DNA, 19 bp, Homo Sapiens
agcattcgggccgagatgt

SEQ ID NO: 3503 - DNA, 19 bp, Homo Sapiens
cattcgggccgagatgtct

SEQ ID NO: 3504 - DNA, 19 bp, Homo Sapiens
attcgggccgagatgtctc

SEQ ID NO: 3505 - DNA, 19 bp, Homo Sapiens
atggagagagaattgaaaa

SEQ ID NO: 3506 - DNA, 19 bp, Homo Sapiens
tggagagagaattgaaaaa

SEQ ID NO: 3507 - DNA, 19 bp, Homo Sapiens
ggagagagaattgaaaaag

SEQ ID NO: 3508 - DNA, 19 bp, Homo Sapiens
gagagagaattgaaaaagt

SEQ ID NO: 3509 - DNA, 19 bp, Homo Sapiens
agagagaattgaaaaagtg

SEQ ID NO: 3510 - DNA, 19 bp, Homo Sapiens
gagagaattgaaaaagtgg

SEQ ID NO: 3511 - DNA, 19 bp, Homo Sapiens
agagaattgaaaaagtgga

SEQ ID NO: 3512 - DNA, 19 bp, Homo Sapiens
gagaattgaaaaagtggag

SEQ ID NO: 3513 - DNA, 19 bp, Homo Sapiens
agaattgaaaaagtggagc

SEQ ID NO: 3514 - DNA, 19 bp, Homo Sapiens
gaattgaaaaagtggagca

SEQ ID NO: 3515 - DNA, 19 bp, Homo Sapiens
aattgaaaaagtggagcat

SEQ ID NO: 3516 - DNA, 19 bp, Homo Sapiens
attgaaaaagtggagcatt

SEQ ID NO: 3517 - DNA, 19 bp, Homo Sapiens
ttgaaaaagtggagcattc

SEQ ID NO: 3518 - DNA, 19 bp, Homo Sapiens
tgaaaaagtggagcattca

SEQ ID NO: 3519 - DNA, 19 bp, Homo Sapiens
gaaaaagtggagcattcag

SEQ ID NO: 3520 - DNA, 19 bp, Homo Sapiens
aaaaagtggagcattcaga

SEQ ID NO: 3521 - DNA, 19 bp, Homo Sapiens
aaaagtggagcattcagac

SEQ ID NO: 3522 - DNA, 19 bp, Homo Sapiens
actacactgaattcacccc

SEQ ID NO: 3523 - DNA, 19 bp, Homo Sapiens
ctacactgaattcaccccc

SEQ ID NO: 3524 - DNA, 19 bp, Homo Sapiens
tacactgaattcaccccca

SEQ ID NO: 3525 - DNA, 19 bp, Homo Sapiens
acactgaattcacccccac

SEQ ID NO: 3526 - DNA, 19 bp, Homo Sapiens
cactgaattcacccccact

SEQ ID NO: 3527 - DNA, 19 bp, Homo Sapiens
actgaattcacccccactg

SEQ ID NO: 3528 - DNA, 19 bp, Homo Sapiens
ctgaattcacccccactga

SEQ ID NO: 3529 - DNA, 19 bp, Homo Sapiens
tgaattcacccccactgaa

SEQ ID NO: 3530 - DNA, 19 bp, Homo Sapiens
gaattcacccccactgaaa

SEQ ID NO: 3531 - DNA, 19 bp, Homo Sapiens
aattcacccccactgaaaa

SEQ ID NO: 3532 - DNA, 19 bp, Homo Sapiens
attcacccccactgaaaaa

SEQ ID NO: 3533 - DNA, 19 bp, Homo Sapiens
ttcacccccactgaaaaag

SEQ ID NO: 3534 - DNA, 19 bp, Homo Sapiens
tcacccccactgaaaaaga

SEQ ID NO: 3535 - DNA, 19 bp, Homo Sapiens
cacccccactgaaaaagat

SEQ ID NO: 3536 - DNA, 19 bp, Homo Sapiens
acccccactgaaaaagatg

SEQ ID NO: 3537 - DNA, 19 bp, Homo Sapiens
cccccactgaaaaagatga

SEQ ID NO: 3538 - DNA, 19 bp, Homo Sapiens
ccccactgaaaaagatgag

SEQ ID NO: 3539 - DNA, 19 bp, Homo Sapiens
cccactgaaaaagatgagt

SEQ ID NO: 3540 - DNA, 19 bp, Homo Sapiens
ccactgaaaaagatgagta

SEQ ID NO: 3541 - DNA, 19 bp, Homo Sapiens
cactgaaaaagatgagtat

SEQ ID NO: 3542 - DNA, 19 bp, Homo Sapiens
actgaaaaagatgagtatg

SEQ ID NO: 3543 - DNA, 19 bp, Homo Sapiens
ctgaaaaagatgagtatgc

SEQ ID NO: 3544 - DNA, 19 bp, Homo Sapiens
tgaaaaagatgagtatgcc

SEQ ID NO: 3545 - DNA, 19 bp, Homo Sapiens
gaaaaagatgagtatgcct

SEQ ID NO: 3546 - DNA, 19 bp, Homo Sapiens
aaaaagatgagtatgcctg

SEQ ID NO: 3547 - DNA, 19 bp, Homo Sapiens
aaaagatgagtatgcctgc

SEQ ID NO: 3548 - DNA, 19 bp, Homo Sapiens
attctgcttgcttgctttt

SEQ ID NO: 3549 - DNA, 19 bp, Homo Sapiens
ttctgcttgcttgcttttt

SEQ ID NO: 3550 - DNA, 19 bp, Homo Sapiens
tctgcttgcttgcttttta

SEQ ID NO: 3551 - DNA, 19 bp, Homo Sapiens
ctgcttgcttgctttttaa

SEQ ID NO: 3552 - DNA, 19 bp, Homo Sapiens
tgcttgcttgctttttaat

SEQ ID NO: 3553 - DNA, 19 bp, Homo Sapiens
gcttgcttgctttttaata

SEQ ID NO: 3554 - DNA, 19 bp, Homo Sapiens
cttgcttgctttttaatat

SEQ ID NO: 3555 - DNA, 19 bp, Homo Sapiens
tgcttgctttttaatattg

SEQ ID NO: 3556 - DNA, 19 bp, Homo Sapiens
gcttgctttttaatattga

SEQ ID NO: 3557 - DNA, 19 bp, Homo Sapiens
ttacactttatgcacaaaa

SEQ ID NO: 3558 - DNA, 19 bp, Homo Sapiens
tacactttatgcacaaaat

SEQ ID NO: 3559 - DNA, 19 bp, Homo Sapiens
acactttatgcacaaaatg

SEQ ID NO: 3560 - DNA, 19 bp, Homo Sapiens
cactttatgcacaaaatgt

SEQ ID NO: 3561 - DNA, 19 bp, Homo Sapiens
actttatgcacaaaatgta

SEQ ID NO: 3562 - DNA, 19 bp, Homo Sapiens
ctttatgcacaaaatgtag

SEQ ID NO: 3563 - DNA, 19 bp, Homo Sapiens
tttatgcacaaaatgtagg

SEQ ID NO: 3564 - DNA, 19 bp, Homo Sapiens
ttatgcacaaaatgtaggg

SEQ ID NO: 3565 - DNA, 19 bp, Homo Sapiens
tatgcacaaaatgtagggt

SEQ ID NO: 3566 - DNA, 19 bp, Homo Sapiens
atgcacaaaatgtagggtt

SEQ ID NO: 3567 - DNA, 19 bp, Homo Sapiens
tgcacaaaatgtagggtta

SEQ ID NO: 3568 - DNA, 19 bp, Homo Sapiens
gcacaaaatgtagggttat

SEQ ID NO: 3569 - DNA, 19 bp, Homo Sapiens
cacaaaatgtagggttata

SEQ ID NO: 3570 - DNA, 19 bp, Homo Sapiens
acaaaatgtagggttataa

SEQ ID NO: 3571 - DNA, 19 bp, Homo Sapiens
caaaatgtagggttataat

SEQ ID NO: 3572 - DNA, 19 bp, Homo Sapiens
tggcaacttagaggtgggg

SEQ ID NO: 3573 - DNA, 19 bp, Homo Sapiens
ggcaacttagaggtgggga

SEQ ID NO: 3574 - DNA, 19 bp, Homo Sapiens
gcaacttagaggtggggag

SEQ ID NO: 3575 - DNA, 19 bp, Homo Sapiens
caacttagaggtggggagc

SEQ ID NO: 3576 - DNA, 19 bp, Homo Sapiens
aacttagaggtggggagca

SEQ ID NO: 3577 - DNA, 19 bp, Homo Sapiens
acttagaggtggggagcag

SEQ ID NO: 3578 - DNA, 19 bp, Homo Sapiens
cttagaggtggggagcaga

SEQ ID NO: 3579 - DNA, 19 bp, Homo Sapiens
ttagaggtggggagcagag

SEQ ID NO: 3580 - DNA, 19 bp, Homo Sapiens
tagaggtggggagcagaga

SEQ ID NO: 3581 - DNA, 19 bp, Homo Sapiens
agaggtggggagcagagaa

SEQ ID NO: 3582 - DNA, 19 bp, Homo Sapiens
gaggtggggagcagagaat

SEQ ID NO: 3583 - DNA, 19 bp, Homo Sapiens
aggtggggagcagagaatt

SEQ ID NO: 3584 - DNA, 19 bp, Homo Sapiens
ggtggggagcagagaattc

SEQ ID NO: 3585 - DNA, 19 bp, Homo Sapiens
gtggggagcagagaattct

SEQ ID NO: 3586 - DNA, 19 bp, Homo Sapiens
tggggagcagagaattctc

SEQ ID NO: 3587 - DNA, 19 bp, Homo Sapiens
ggggagcagagaattctct

SEQ ID NO: 3588 - DNA, 19 bp, Homo Sapiens
ctctgcttagaatttgggg

SEQ ID NO: 3589 - DNA, 19 bp, Homo Sapiens
tctgcttagaatttggggg

SEQ ID NO: 3590 - DNA, 19 bp, Homo Sapiens
ctgcttagaatttggggga

SEQ ID NO: 3591 - DNA, 19 bp, Homo Sapiens
tgcttagaatttgggggaa

SEQ ID NO: 3592 - DNA, 19 bp, Homo Sapiens
gcttagaatttgggggaaa

SEQ ID NO: 3593 - DNA, 19 bp, Homo Sapiens
cttagaatttgggggaaaa

SEQ ID NO: 3594 - DNA, 19 bp, Homo Sapiens
ttagaatttgggggaaaat

SEQ ID NO: 3595 - DNA, 19 bp, Homo Sapiens
tagaatttgggggaaaatt

SEQ ID NO: 3596 - DNA, 19 bp, Homo Sapiens
agaatttgggggaaaattt

SEQ ID NO: 3597 - DNA, 19 bp, Homo Sapiens
gaatttgggggaaaattta

SEQ ID NO: 3598 - DNA, 19 bp, Homo Sapiens
aatttgggggaaaatttag

SEQ ID NO: 3599 - DNA, 19 bp, Homo Sapiens
atttgggggaaaatttaga

SEQ ID NO: 3600 - DNA, 19 bp, Homo Sapiens
tttgggggaaaatttagaa

SEQ ID NO: 3601 - DNA, 19 bp, Homo Sapiens
ttgggggaaaatttagaaa

SEQ ID NO: 3602 - DNA, 19 bp, Homo Sapiens
tgggggaaaatttagaaat

SEQ ID NO: 3603 - DNA, 19 bp, Homo Sapiens
gggggaaaatttagaaata

SEQ ID NO: 3604 - DNA, 19 bp, Homo Sapiens
ggggaaaatttagaaatat

SEQ ID NO: 3605 - DNA, 19 bp, Homo Sapiens
atgaatgaaacattttgtc

SEQ ID NO: 3606 - DNA, 19 bp, Homo Sapiens
tgaatgaaacattttgtca

SEQ ID NO: 3607 - DNA, 19 bp, Homo Sapiens
gaatgaaacattttgtcat

SEQ ID NO: 3608 - DNA, 19 bp, Homo Sapiens
ggttaatctggtttatttt

SEQ ID NO: 3609 - DNA, 19 bp, Homo Sapiens
atctggtttatttttgttc

SEQ ID NO: 3610 - DNA, 19 bp, Homo Sapiens
tctggtttatttttgttcc

SEQ ID NO: 3611 - DNA, 19 bp, Homo Sapiens
ctggtttatttttgttcca

SEQ ID NO: 3612 - DNA, 19 bp, Homo Sapiens
tggtttatttttgttccac

SEQ ID NO: 3613 - DNA, 19 bp, Homo Sapiens
ggtttatttttgttccaca

SEQ ID NO: 3614 - DNA, 19 bp, Homo Sapiens
gtttatttttgttccacaa

SEQ ID NO: 3615 - DNA, 19 bp, Homo Sapiens
tttatttttgttccacaag

SEQ ID NO: 3616 - DNA, 19 bp, Homo Sapiens
ttatttttgttccacaagt

SEQ ID NO: 3617 - DNA, 19 bp, Homo Sapiens
tatttttgttccacaagtt

SEQ ID NO: 3618 - DNA, 19 bp, Homo Sapiens
atttttgttccacaagtta

SEQ ID NO: 3619 - DNA, 19 bp, Homo Sapiens
tttttgttccacaagttaa

SEQ ID NO: 3620 - DNA, 19 bp, Homo Sapiens
ttttgttccacaagttaaa

SEQ ID NO: 3621 - DNA, 20 bp, Homo Sapiens
aatggagagagaattgaaaa

SEQ ID NO: 3622 - DNA, 20 bp, Homo Sapiens
atggagagagaattgaaaaa

SEQ ID NO: 3623 - DNA, 20 bp, Homo Sapiens
tggagagagaattgaaaaag

SEQ ID NO: 3624 - DNA, 20 bp, Homo Sapiens
ggagagagaattgaaaaagt

SEQ ID NO: 3625 - DNA, 20 bp, Homo Sapiens
gagagagaattgaaaaagtg

SEQ ID NO: 3626 - DNA, 20 bp, Homo Sapiens
agagagaattgaaaaagtgg

SEQ ID NO: 3627 - DNA, 20 bp, Homo Sapiens
gagagaattgaaaaagtgga

SEQ ID NO: 3628 - DNA, 20 bp, Homo Sapiens
agagaattgaaaaagtggag

SEQ ID NO: 3629 - DNA, 20 bp, Homo Sapiens
gagaattgaaaaagtggagc

SEQ ID NO: 3630 - DNA, 20 bp, Homo Sapiens
agaattgaaaaagtggagca

SEQ ID NO: 3631 - DNA, 20 bp, Homo Sapiens
gaattgaaaaagtggagcat

SEQ ID NO: 3632 - DNA, 20 bp, Homo Sapiens
aattgaaaaagtggagcatt

SEQ ID NO: 3633 - DNA, 20 bp, Homo Sapiens
attgaaaaagtggagcattc

SEQ ID NO: 3634 - DNA, 20 bp, Homo Sapiens
ttgaaaaagtggagcattca

SEQ ID NO: 3635 - DNA, 20 bp, Homo Sapiens
tgaaaaagtggagcattcag

SEQ ID NO: 3636 - DNA, 20 bp, Homo Sapiens
gaaaaagtggagcattcaga

SEQ ID NO: 3637 - DNA, 20 bp, Homo Sapiens
aaaaagtggagcattcagac

SEQ ID NO: 3638 - DNA, 20 bp, Homo Sapiens
aaaagtggagcattcagact

SEQ ID NO: 3639 - DNA, 20 bp, Homo Sapiens
tactacactgaattcacccc

SEQ ID NO: 3640 - DNA, 20 bp, Homo Sapiens
actacactgaattcaccccc

SEQ ID NO: 3641 - DNA, 20 bp, Homo Sapiens
ctacactgaattcaccccca

SEQ ID NO: 3642 - DNA, 20 bp, Homo Sapiens
tacactgaattcacccccac

SEQ ID NO: 3643 - DNA, 20 bp, Homo Sapiens
acactgaattcacccccact

SEQ ID NO: 3644 - DNA, 20 bp, Homo Sapiens
cactgaattcacccccactg

SEQ ID NO: 3645 - DNA, 20 bp, Homo Sapiens
actgaattcacccccactga

SEQ ID NO: 3646 - DNA, 20 bp, Homo Sapiens
ctgaattcacccccactgaa

SEQ ID NO: 3647 - DNA, 20 bp, Homo Sapiens
tgaattcacccccactgaaa

SEQ ID NO: 3648 - DNA, 20 bp, Homo Sapiens
gaattcacccccactgaaaa

SEQ ID NO: 3649 - DNA, 20 bp, Homo Sapiens
aattcacccccactgaaaaa

SEQ ID NO: 3650 - DNA, 20 bp, Homo Sapiens
attcacccccactgaaaaag

SEQ ID NO: 3651 - DNA, 20 bp, Homo Sapiens
ttcacccccactgaaaaaga

SEQ ID NO: 3652 - DNA, 20 bp, Homo Sapiens
tcacccccactgaaaaagat

SEQ ID NO: 3653 - DNA, 20 bp, Homo Sapiens
cacccccactgaaaaagatg

SEQ ID NO: 3654 - DNA, 20 bp, Homo Sapiens
acccccactgaaaaagatga

SEQ ID NO: 3655 - DNA, 20 bp, Homo Sapiens
cccccactgaaaaagatgag

SEQ ID NO: 3656 - DNA, 20 bp, Homo Sapiens
ccccactgaaaaagatgagt

SEQ ID NO: 3657 - DNA, 20 bp, Homo Sapiens
cccactgaaaaagatgagta

SEQ ID NO: 3658 - DNA, 20 bp, Homo Sapiens
ccactgaaaaagatgagtat

SEQ ID NO: 3659 - DNA, 20 bp, Homo Sapiens
cactgaaaaagatgagtatg

SEQ ID NO: 3660 - DNA, 20 bp, Homo Sapiens
actgaaaaagatgagtatgc

SEQ ID NO: 3661 - DNA, 20 bp, Homo Sapiens
ctgaaaaagatgagtatgcc

SEQ ID NO: 3662 - DNA, 20 bp, Homo Sapiens
tgaaaaagatgagtatgcct

SEQ ID NO: 3663 - DNA, 20 bp, Homo Sapiens
gaaaaagatgagtatgcctg

SEQ ID NO: 3664 - DNA, 20 bp, Homo Sapiens
aaaaagatgagtatgcctgc

SEQ ID NO: 3665 - DNA, 20 bp, Homo Sapiens
aaaagatgagtatgcctgcc

SEQ ID NO: 3666 - DNA, 20 bp, Homo Sapiens
aattctgcttgcttgctttt

SEQ ID NO: 3667 - DNA, 20 bp, Homo Sapiens
attctgcttgcttgcttttt

SEQ ID NO: 3668 - DNA, 20 bp, Homo Sapiens
ttctgcttgcttgcttttta

SEQ ID NO: 3669 - DNA, 20 bp, Homo Sapiens
tctgcttgcttgctttttaa

SEQ ID NO: 3670 - DNA, 20 bp, Homo Sapiens
ctgcttgcttgctttttaat

SEQ ID NO: 3671 - DNA, 20 bp, Homo Sapiens
tgcttgcttgctttttaata

SEQ ID NO: 3672 - DNA, 20 bp, Homo Sapiens
gcttgcttgctttttaatat

SEQ ID NO: 3673 - DNA, 20 bp, Homo Sapiens
cttgcttgctttttaatatt

SEQ ID NO: 3674 - DNA, 20 bp, Homo Sapiens
ttgcttgctttttaatattg

SEQ ID NO: 3675 - DNA, 20 bp, Homo Sapiens
tgcttgctttttaatattga

SEQ ID NO: 3676 - DNA, 20 bp, Homo Sapiens
gcttgctttttaatattgat

SEQ ID NO: 3677 - DNA, 20 bp, Homo Sapiens
gctttttaatattgatatgc

SEQ ID NO: 3678 - DNA, 20 bp, Homo Sapiens
cttacactttatgcacaaaa

SEQ ID NO: 3679 - DNA, 20 bp, Homo Sapiens
ttacactttatgcacaaaat

SEQ ID NO: 3680 - DNA, 20 bp, Homo Sapiens
tacactttatgcacaaaatg

SEQ ID NO: 3681 - DNA, 20 bp, Homo Sapiens
acactttatgcacaaaatgt

SEQ ID NO: 3682 - DNA, 20 bp, Homo Sapiens
cactttatgcacaaaatgta

SEQ ID NO: 3683 - DNA, 20 bp, Homo Sapiens
actttatgcacaaaatgtag

SEQ ID NO: 3684 - DNA, 20 bp, Homo Sapiens
ctttatgcacaaaatgtagg

SEQ ID NO: 3685 - DNA, 20 bp, Homo Sapiens
tttatgcacaaaatgtaggg

SEQ ID NO: 3686 - DNA, 20 bp, Homo Sapiens
ttatgcacaaaatgtagggt

SEQ ID NO: 3687 - DNA, 20 bp, Homo Sapiens
tatgcacaaaatgtagggtt

SEQ ID NO: 3688 - DNA, 20 bp, Homo Sapiens
atgcacaaaatgtagggtta

SEQ ID NO: 3689 - DNA, 20 bp, Homo Sapiens
tgcacaaaatgtagggttat

SEQ ID NO: 3690 - DNA, 20 bp, Homo Sapiens
gcacaaaatgtagggttata

SEQ ID NO: 3691 - DNA, 20 bp, Homo Sapiens
cacaaaatgtagggttataa

SEQ ID NO: 3692 - DNA, 20 bp, Homo Sapiens
acaaaatgtagggttataat

SEQ ID NO: 3693 - DNA, 20 bp, Homo Sapiens
caaaatgtagggttataata

SEQ ID NO: 3694 - DNA, 20 bp, Homo Sapiens
tggcaacttagaggtgggga

SEQ ID NO: 3695 - DNA, 20 bp, Homo Sapiens
caacttagaggtggggagca

SEQ ID NO: 3696 - DNA, 20 bp, Homo Sapiens
aacttagaggtggggagcag

SEQ ID NO: 3697 - DNA, 20 bp, Homo Sapiens
acttagaggtggggagcaga

SEQ ID NO: 3698 - DNA, 20 bp, Homo Sapiens
ttagaggtggggagcagaga

SEQ ID NO: 3699 - DNA, 20 bp, Homo Sapiens
tagaggtggggagcagagaa

SEQ ID NO: 3700 - DNA, 20 bp, Homo Sapiens
agaggtggggagcagagaat

SEQ ID NO: 3701 - DNA, 20 bp, Homo Sapiens
gaggtggggagcagagaatt

SEQ ID NO: 3702 - DNA, 20 bp, Homo Sapiens
aggtggggagcagagaattc

SEQ ID NO: 3703 - DNA, 20 bp, Homo Sapiens
ggtggggagcagagaattct

SEQ ID NO: 3704 - DNA, 20 bp, Homo Sapiens
gtggggagcagagaattctc

SEQ ID NO: 3705 - DNA, 20 bp, Homo Sapiens
tggggagcagagaattctct

SEQ ID NO: 3706 - DNA, 20 bp, Homo Sapiens
ggggagcagagaattctctt

SEQ ID NO: 3707 - DNA, 20 bp, Homo Sapiens
actctgcttagaatttgggg

SEQ ID NO: 3708 - DNA, 20 bp, Homo Sapiens
ctctgcttagaatttggggg

SEQ ID NO: 3709 - DNA, 20 bp, Homo Sapiens
tctgcttagaatttggggga

SEQ ID NO: 3710 - DNA, 20 bp, Homo Sapiens
ctgcttagaatttgggggaa

SEQ ID NO: 3711 - DNA, 20 bp, Homo Sapiens
tgcttagaatttgggggaaa

SEQ ID NO: 3712 - DNA, 20 bp, Homo Sapiens
gcttagaatttgggggaaaa

SEQ ID NO: 3713 - DNA, 20 bp, Homo Sapiens
cttagaatttgggggaaaat

SEQ ID NO: 3714 - DNA, 20 bp, Homo Sapiens
ttagaatttgggggaaaatt

SEQ ID NO: 3715 - DNA, 20 bp, Homo Sapiens
tagaatttgggggaaaattt

SEQ ID NO: 3716 - DNA, 20 bp, Homo Sapiens
agaatttgggggaaaattta

SEQ ID NO: 3717 - DNA, 20 bp, Homo Sapiens
gaatttgggggaaaatttag

SEQ ID NO: 3718 - DNA, 20 bp, Homo Sapiens
aatttgggggaaaatttaga

SEQ ID NO: 3719 - DNA, 20 bp, Homo Sapiens
atttgggggaaaatttagaa

SEQ ID NO: 3720 - DNA, 20 bp, Homo Sapiens
tttgggggaaaatttagaaa

SEQ ID NO: 3721 - DNA, 20 bp, Homo Sapiens
ttgggggaaaatttagaaat

SEQ ID NO: 3722 - DNA, 20 bp, Homo Sapiens
tgggggaaaatttagaaata

SEQ ID NO: 3723 - DNA, 20 bp, Homo Sapiens
gggggaaaatttagaaatat

SEQ ID NO: 3724 - DNA, 20 bp, Homo Sapiens
ggggaaaatttagaaatata

SEQ ID NO: 3725 - DNA, 20 bp, Homo Sapiens
aatgaatgaaacattttgtc

SEQ ID NO: 3726 - DNA, 20 bp, Homo Sapiens
atgaatgaaacattttgtca

SEQ ID NO: 3727 - DNA, 20 bp, Homo Sapiens
tgaatgaaacattttgtcat

SEQ ID NO: 3728 - DNA, 20 bp, Homo Sapiens
gaatgaaacattttgtcata

SEQ ID NO: 3729 - DNA, 20 bp, Homo Sapiens
gaaacattttgtcatataag

SEQ ID NO: 3730 - DNA, 20 bp, Homo Sapiens
cattttgtcatataagattc

SEQ ID NO: 3731 - DNA, 20 bp, Homo Sapiens
tggttaatctggtttatttt

SEQ ID NO: 3732 - DNA, 20 bp, Homo Sapiens
ggttaatctggtttattttt

SEQ ID NO: 3733 - DNA, 20 bp, Homo Sapiens
gttaatctggtttatttttg

SEQ ID NO: 3734 - DNA, 20 bp, Homo Sapiens
aatctggtttatttttgttc

SEQ ID NO: 3735 - DNA, 20 bp, Homo Sapiens
atctggtttatttttgttcc

SEQ ID NO: 3736 - DNA, 20 bp, Homo Sapiens
tctggtttatttttgttcca

SEQ ID NO: 3737 - DNA, 20 bp, Homo Sapiens
ctggtttatttttgttccac

SEQ ID NO: 3738 - DNA, 20 bp, Homo Sapiens
tggtttatttttgttccaca

SEQ ID NO: 3739 - DNA, 20 bp, Homo Sapiens
ggtttatttttgttccacaa

SEQ ID NO: 3740 - DNA, 20 bp, Homo Sapiens
gtttatttttgttccacaag

SEQ ID NO: 3741 - DNA, 20 bp, Homo Sapiens
tttatttttgttccacaagt

SEQ ID NO: 3742 - DNA, 20 bp, Homo Sapiens
ttatttttgttccacaagtt

SEQ ID NO: 3743 - DNA, 20 bp, Homo Sapiens
tatttttgttccacaagtta

SEQ ID NO: 3744 - DNA, 20 bp, Homo Sapiens
atttttgttccacaagttaa

SEQ ID NO: 3745 - DNA, 20 bp, Homo Sapiens
tttttgttccacaagttaaa

SEQ ID NO: 3746 - DNA, 20 bp, Homo Sapiens
ttttgttccacaagttaaat

SEQ ID NO: 3747 - DNA, 21 bp, Homo Sapiens
tgacagcattcgggccgagat

SEQ ID NO: 3748 - DNA, 21 bp, Homo Sapiens
acagcattcgggccgagatgt

SEQ ID NO: 3749 - DNA, 21 bp, Homo Sapiens
agcattcgggccgagatgtct

SEQ ID NO: 3750 - DNA, 21 bp, Homo Sapiens
gaatggagagagaattgaaaa

SEQ ID NO: 3751 - DNA, 21 bp, Homo Sapiens
aatggagagagaattgaaaaa

SEQ ID NO: 3752 - DNA, 21 bp, Homo Sapiens
atggagagagaattgaaaaag

SEQ ID NO: 3753 - DNA, 21 bp, Homo Sapiens
tggagagagaattgaaaaagt

SEQ ID NO: 3754 - DNA, 21 bp, Homo Sapiens
ggagagagaattgaaaaagtg

SEQ ID NO: 3755 - DNA, 21 bp, Homo Sapiens
gagagagaattgaaaaagtgg

SEQ ID NO: 3756 - DNA, 21 bp, Homo Sapiens
agagagaattgaaaaagtgga

SEQ ID NO: 3757 - DNA, 21 bp, Homo Sapiens
gagagaattgaaaaagtggag

SEQ ID NO: 3758 - DNA, 21 bp, Homo Sapiens
agagaattgaaaaagtggagc

SEQ ID NO: 3759 - DNA, 21 bp, Homo Sapiens
gagaattgaaaaagtggagca

SEQ ID NO: 3760 - DNA, 21 bp, Homo Sapiens
agaattgaaaaagtggagcat

SEQ ID NO: 3761 - DNA, 21 bp, Homo Sapiens
gaattgaaaaagtggagcatt

SEQ ID NO: 3762 - DNA, 21 bp, Homo Sapiens
aattgaaaaagtggagcattc

SEQ ID NO: 3763 - DNA, 21 bp, Homo Sapiens
attgaaaaagtggagcattca

SEQ ID NO: 3764 - DNA, 21 bp, Homo Sapiens
ttgaaaaagtggagcattcag

SEQ ID NO: 3765 - DNA, 21 bp, Homo Sapiens
tgaaaaagtggagcattcaga

SEQ ID NO: 3766 - DNA, 21 bp, Homo Sapiens
gaaaaagtggagcattcagac

SEQ ID NO: 3767 - DNA, 21 bp, Homo Sapiens
aaaaagtggagcattcagact

SEQ ID NO: 3768 - DNA, 21 bp, Homo Sapiens
aaaagtggagcattcagactt

SEQ ID NO: 3769 - DNA, 21 bp, Homo Sapiens
gtactacactgaattcacccc

SEQ ID NO: 3770 - DNA, 21 bp, Homo Sapiens
tactacactgaattcaccccc

SEQ ID NO: 3771 - DNA, 21 bp, Homo Sapiens
actacactgaattcaccccca

SEQ ID NO: 3772 - DNA, 21 bp, Homo Sapiens
ctacactgaattcacccccac

SEQ ID NO: 3773 - DNA, 21 bp, Homo Sapiens
tacactgaattcacccccact

SEQ ID NO: 3774 - DNA, 21 bp, Homo Sapiens
acactgaattcacccccactg

SEQ ID NO: 3775 - DNA, 21 bp, Homo Sapiens
cactgaattcacccccactga

SEQ ID NO: 3776 - DNA, 21 bp, Homo Sapiens
actgaattcacccccactgaa

SEQ ID NO: 3777 - DNA, 21 bp, Homo Sapiens
ctgaattcacccccactgaaa

SEQ ID NO: 3778 - DNA, 21 bp, Homo Sapiens
tgaattcacccccactgaaaa

SEQ ID NO: 3779 - DNA, 21 bp, Homo Sapiens
gaattcacccccactgaaaaa

SEQ ID NO: 3780 - DNA, 21 bp, Homo Sapiens
aattcacccccactgaaaaag

SEQ ID NO: 3781 - DNA, 21 bp, Homo Sapiens
attcacccccactgaaaaaga

SEQ ID NO: 3782 - DNA, 21 bp, Homo Sapiens
ttcacccccactgaaaaagat

SEQ ID NO: 3783 - DNA, 21 bp, Homo Sapiens
tcacccccactgaaaaagatg

SEQ ID NO: 3784 - DNA, 21 bp, Homo Sapiens
cacccccactgaaaaagatga

SEQ ID NO: 3785 - DNA, 21 bp, Homo Sapiens
acccccactgaaaaagatgag

SEQ ID NO: 3786 - DNA, 21 bp, Homo Sapiens
cccccactgaaaaagatgagt

SEQ ID NO: 3787 - DNA, 21 bp, Homo Sapiens
ccccactgaaaaagatgagta

SEQ ID NO: 3788 - DNA, 21 bp, Homo Sapiens
cccactgaaaaagatgagtat

SEQ ID NO: 3789 - DNA, 21 bp, Homo Sapiens
ccactgaaaaagatgagtatg

SEQ ID NO: 3790 - DNA, 21 bp, Homo Sapiens
cactgaaaaagatgagtatgc

SEQ ID NO: 3791 - DNA, 21 bp, Homo Sapiens
actgaaaaagatgagtatgcc

SEQ ID NO: 3792 - DNA, 21 bp, Homo Sapiens
ctgaaaaagatgagtatgcct

SEQ ID NO: 3793 - DNA, 21 bp, Homo Sapiens
tgaaaaagatgagtatgcctg

SEQ ID NO: 3794 - DNA, 21 bp, Homo Sapiens
gaaaaagatgagtatgcctgc

SEQ ID NO: 3795 - DNA, 21 bp, Homo Sapiens
aaaaagatgagtatgcctgcc

SEQ ID NO: 3796 - DNA, 21 bp, Homo Sapiens
aaaagatgagtatgcctgccg

SEQ ID NO: 3797 - DNA, 21 bp, Homo Sapiens
aaattctgcttgcttgctttt

SEQ ID NO: 3798 - DNA, 21 bp, Homo Sapiens
aattctgcttgcttgcttttt

SEQ ID NO: 3799 - DNA, 21 bp, Homo Sapiens
attctgcttgcttgcttttta

SEQ ID NO: 3800 - DNA, 21 bp, Homo Sapiens
ttctgcttgcttgctttttaa

SEQ ID NO: 3801 - DNA, 21 bp, Homo Sapiens
tctgcttgcttgctttttaat

SEQ ID NO: 3802 - DNA, 21 bp, Homo Sapiens
ctgcttgcttgctttttaata

SEQ ID NO: 3803 - DNA, 21 bp, Homo Sapiens
tgcttgcttgctttttaatat

SEQ ID NO: 3804 - DNA, 21 bp, Homo Sapiens
gcttgcttgctttttaatatt

SEQ ID NO: 3805 - DNA, 21 bp, Homo Sapiens
cttgcttgctttttaatattg

SEQ ID NO: 3806 - DNA, 21 bp, Homo Sapiens
acttacactttatgcacaaaa

SEQ ID NO: 3807 - DNA, 21 bp, Homo Sapiens
cttacactttatgcacaaaat

SEQ ID NO: 3808 - DNA, 21 bp, Homo Sapiens
ttacactttatgcacaaaatg

SEQ ID NO: 3809 - DNA, 21 bp, Homo Sapiens
tacactttatgcacaaaatgt

SEQ ID NO: 3810 - DNA, 21 bp, Homo Sapiens
acactttatgcacaaaatgta

SEQ ID NO: 3811 - DNA, 21 bp, Homo Sapiens
cactttatgcacaaaatgtag

SEQ ID NO: 3812 - DNA, 21 bp, Homo Sapiens
actttatgcacaaaatgtagg

SEQ ID NO: 3813 - DNA, 21 bp, Homo Sapiens
ctttatgcacaaaatgtaggg

SEQ ID NO: 3814 - DNA, 21 bp, Homo Sapiens
tttatgcacaaaatgtagggt

SEQ ID NO: 3815 - DNA, 21 bp, Homo Sapiens
ttatgcacaaaatgtagggtt

SEQ ID NO: 3816 - DNA, 21 bp, Homo Sapiens
tatgcacaaaatgtagggtta

SEQ ID NO: 3817 - DNA, 21 bp, Homo Sapiens
atgcacaaaatgtagggttat

SEQ ID NO: 3818 - DNA, 21 bp, Homo Sapiens
tgcacaaaatgtagggttata

SEQ ID NO: 3819 - DNA, 21 bp, Homo Sapiens
gcacaaaatgtagggttataa

SEQ ID NO: 3820 - DNA, 21 bp, Homo Sapiens
cacaaaatgtagggttataat

SEQ ID NO: 3821 - DNA, 21 bp, Homo Sapiens
ctggcaacttagaggtgggga

SEQ ID NO: 3822 - DNA, 21 bp, Homo Sapiens
tggcaacttagaggtggggag

SEQ ID NO: 3823 - DNA, 21 bp, Homo Sapiens
gcaacttagaggtggggagca

SEQ ID NO: 3824 - DNA, 21 bp, Homo Sapiens
caacttagaggtggggagcag

SEQ ID NO: 3825 - DNA, 21 bp, Homo Sapiens
aacttagaggtggggagcaga

SEQ ID NO: 3826 - DNA, 21 bp, Homo Sapiens
acttagaggtggggagcagag

SEQ ID NO: 3827 - DNA, 21 bp, Homo Sapiens
cttagaggtggggagcagaga

SEQ ID NO: 3828 - DNA, 21 bp, Homo Sapiens
ttagaggtggggagcagagaa

SEQ ID NO: 3829 - DNA, 21 bp, Homo Sapiens
tagaggtggggagcagagaat

SEQ ID NO: 3830 - DNA, 21 bp, Homo Sapiens
agaggtggggagcagagaatt

SEQ ID NO: 3831 - DNA, 21 bp, Homo Sapiens
gaggtggggagcagagaattc

SEQ ID NO: 3832 - DNA, 21 bp, Homo Sapiens
aggtggggagcagagaattct

SEQ ID NO: 3833 - DNA, 21 bp, Homo Sapiens
ggtggggagcagagaattctc

SEQ ID NO: 3834 - DNA, 21 bp, Homo Sapiens
gtggggagcagagaattctct

SEQ ID NO: 3835 - DNA, 21 bp, Homo Sapiens
tggggagcagagaattctctt

SEQ ID NO: 3836 - DNA, 21 bp, Homo Sapiens
ggggagcagagaattctctta

SEQ ID NO: 3837 - DNA, 21 bp, Homo Sapiens
tactctgcttagaatttgggg

SEQ ID NO: 3838 - DNA, 21 bp, Homo Sapiens
actctgcttagaatttggggg

SEQ ID NO: 3839 - DNA, 21 bp, Homo Sapiens
ctctgcttagaatttggggga

SEQ ID NO: 3840 - DNA, 21 bp, Homo Sapiens
tctgcttagaatttgggggaa

SEQ ID NO: 3841 - DNA, 21 bp, Homo Sapiens
ctgcttagaatttgggggaaa

SEQ ID NO: 3842 - DNA, 21 bp, Homo Sapiens
tgcttagaatttgggggaaaa

SEQ ID NO: 3843 - DNA, 21 bp, Homo Sapiens
gcttagaatttgggggaaaat

SEQ ID NO: 3844 - DNA, 21 bp, Homo Sapiens
cttagaatttgggggaaaatt

SEQ ID NO: 3845 - DNA, 21 bp, Homo Sapiens
ttagaatttgggggaaaattt

SEQ ID NO: 3846 - DNA, 21 bp, Homo Sapiens
tagaatttgggggaaaattta

SEQ ID NO: 3847 - DNA, 21 bp, Homo Sapiens
agaatttgggggaaaatttag

SEQ ID NO: 3848 - DNA, 21 bp, Homo Sapiens
gaatttgggggaaaatttaga

SEQ ID NO: 3849 - DNA, 21 bp, Homo Sapiens
aatttgggggaaaatttagaa

SEQ ID NO: 3850 - DNA, 21 bp, Homo Sapiens
atttgggggaaaatttagaaa

SEQ ID NO: 3851 - DNA, 21 bp, Homo Sapiens
tttgggggaaaatttagaaat

SEQ ID NO: 3852 - DNA, 21 bp, Homo Sapiens
ttgggggaaaatttagaaata

SEQ ID NO: 3853 - DNA, 21 bp, Homo Sapiens
tgggggaaaatttagaaatat

SEQ ID NO: 3854 - DNA, 21 bp, Homo Sapiens
gggggaaaatttagaaatata

SEQ ID NO: 3855 - DNA, 21 bp, Homo Sapiens
gtggttaatctggtttatttt

SEQ ID NO: 3856 - DNA, 21 bp, Homo Sapiens
ggttaatctggtttatttttg

SEQ ID NO: 3857 - DNA, 21 bp, Homo Sapiens
aatctggtttatttttgttcc

SEQ ID NO: 3858 - DNA, 21 bp, Homo Sapiens
atctggtttatttttgttcca

SEQ ID NO: 3859 - DNA, 21 bp, Homo Sapiens
tctggtttatttttgttccac

SEQ ID NO: 3860 - DNA, 21 bp, Homo Sapiens
ctggtttatttttgttccaca

SEQ ID NO: 3861 - DNA, 21 bp, Homo Sapiens
tggtttatttttgttccacaa

SEQ ID NO: 3862 - DNA, 21 bp, Homo Sapiens
ggtttatttttgttccacaag

SEQ ID NO: 3863 - DNA, 21 bp, Homo Sapiens
gtttatttttgttccacaagt

SEQ ID NO: 3864 - DNA, 22 bp, Homo Sapiens
aagctgacagcattcgggccga

SEQ ID NO: 3865 - DNA, 22 bp, Homo Sapiens
ctgacagcattcgggccgagat

SEQ ID NO: 3866 - DNA, 22 bp, Homo Sapiens
tgacagcattcgggccgagatg

SEQ ID NO: 3867 - DNA, 22 bp, Homo Sapiens
gacagcattcgggccgagatgt

SEQ ID NO: 3868 - DNA, 22 bp, Homo Sapiens
acagcattcgggccgagatgtc

SEQ ID NO: 3869 - DNA, 22 bp, Homo Sapiens
cagcattcgggccgagatgtct

SEQ ID NO: 3870 - DNA, 22 bp, Homo Sapiens
agcattcgggccgagatgtctc

SEQ ID NO: 3871 - DNA, 22 bp, Homo Sapiens
attcgggccgagatgtctcgct

SEQ ID NO: 3872 - DNA, 22 bp, Homo Sapiens
agaatggagagagaattgaaaa

SEQ ID NO: 3873 - DNA, 22 bp, Homo Sapiens
gaatggagagagaattgaaaaa

SEQ ID NO: 3874 - DNA, 22 bp, Homo Sapiens
aatggagagagaattgaaaaag

SEQ ID NO: 3875 - DNA, 22 bp, Homo Sapiens
atggagagagaattgaaaaagt

SEQ ID NO: 3876 - DNA, 22 bp, Homo Sapiens
tggagagagaattgaaaaagtg

SEQ ID NO: 3877 - DNA, 22 bp, Homo Sapiens
ggagagagaattgaaaaagtgg

SEQ ID NO: 3878 - DNA, 22 bp, Homo Sapiens
gagagagaattgaaaaagtgga

SEQ ID NO: 3879 - DNA, 22 bp, Homo Sapiens
agagagaattgaaaaagtggag

SEQ ID NO: 3880 - DNA, 22 bp, Homo Sapiens
gagagaattgaaaaagtggagc

SEQ ID NO: 3881 - DNA, 22 bp, Homo Sapiens
agagaattgaaaaagtggagca

SEQ ID NO: 3882 - DNA, 22 bp, Homo Sapiens
gagaattgaaaaagtggagcat

SEQ ID NO: 3883 - DNA, 22 bp, Homo Sapiens
agaattgaaaaagtggagcatt

SEQ ID NO: 3884 - DNA, 22 bp, Homo Sapiens
gaattgaaaaagtggagcattc

SEQ ID NO: 3885 - DNA, 22 bp, Homo Sapiens
aattgaaaaagtggagcattca

SEQ ID NO: 3886 - DNA, 22 bp, Homo Sapiens
attgaaaaagtggagcattcag

SEQ ID NO: 3887 - DNA, 22 bp, Homo Sapiens
ttgaaaaagtggagcattcaga

SEQ ID NO: 3888 - DNA, 22 bp, Homo Sapiens
tgaaaaagtggagcattcagac

SEQ ID NO: 3889 - DNA, 22 bp, Homo Sapiens
gaaaaagtggagcattcagact

SEQ ID NO: 3890 - DNA, 22 bp, Homo Sapiens
aaaaagtggagcattcagactt

SEQ ID NO: 3891 - DNA, 22 bp, Homo Sapiens
aaaagtggagcattcagacttg

SEQ ID NO: 3892 - DNA, 22 bp, Homo Sapiens
tgtactacactgaattcacccc

SEQ ID NO: 3893 - DNA, 22 bp, Homo Sapiens
gtactacactgaattcaccccc

SEQ ID NO: 3894 - DNA, 22 bp, Homo Sapiens
tactacactgaattcaccccca

SEQ ID NO: 3895 - DNA, 22 bp, Homo Sapiens
actacactgaattcacccccac

SEQ ID NO: 3896 - DNA, 22 bp, Homo Sapiens
ctacactgaattcacccccact

SEQ ID NO: 3897 - DNA, 22 bp, Homo Sapiens
tacactgaattcacccccactg

SEQ ID NO: 3898 - DNA, 22 bp, Homo Sapiens
acactgaattcacccccactga

SEQ ID NO: 3899 - DNA, 22 bp, Homo Sapiens
cactgaattcacccccactgaa

SEQ ID NO: 3900 - DNA, 22 bp, Homo Sapiens
actgaattcacccccactgaaa

SEQ ID NO: 3901 - DNA, 22 bp, Homo Sapiens
ctgaattcacccccactgaaaa

SEQ ID NO: 3902 - DNA, 22 bp, Homo Sapiens
tgaattcacccccactgaaaaa

SEQ ID NO: 3903 - DNA, 22 bp, Homo Sapiens
gaattcacccccactgaaaaag

SEQ ID NO: 3904 - DNA, 22 bp, Homo Sapiens
aattcacccccactgaaaaaga

SEQ ID NO: 3905 - DNA, 22 bp, Homo Sapiens
attcacccccactgaaaaagat

SEQ ID NO: 3906 - DNA, 22 bp, Homo Sapiens
ttcacccccactgaaaaagatg

SEQ ID NO: 3907 - DNA, 22 bp, Homo Sapiens
tcacccccactgaaaaagatga

SEQ ID NO: 3908 - DNA, 22 bp, Homo Sapiens
cacccccactgaaaaagatgag

SEQ ID NO: 3909 - DNA, 22 bp, Homo Sapiens
acccccactgaaaaagatgagt

SEQ ID NO: 3910 - DNA, 22 bp, Homo Sapiens
cccccactgaaaaagatgagta

SEQ ID NO: 3911 - DNA, 22 bp, Homo Sapiens
ccccactgaaaaagatgagtat

SEQ ID NO: 3912 - DNA, 22 bp, Homo Sapiens
cccactgaaaaagatgagtatg

SEQ ID NO: 3913 - DNA, 22 bp, Homo Sapiens
ccactgaaaaagatgagtatgc

SEQ ID NO: 3914 - DNA, 22 bp, Homo Sapiens
cactgaaaaagatgagtatgcc

SEQ ID NO: 3915 - DNA, 22 bp, Homo Sapiens
actgaaaaagatgagtatgcct

SEQ ID NO: 3916 - DNA, 22 bp, Homo Sapiens
ctgaaaaagatgagtatgcctg

SEQ ID NO: 3917 - DNA, 22 bp, Homo Sapiens
tgaaaaagatgagtatgcctgc

SEQ ID NO: 3918 - DNA, 22 bp, Homo Sapiens
gaaaaagatgagtatgcctgcc

SEQ ID NO: 3919 - DNA, 22 bp, Homo Sapiens
aaaaagatgagtatgcctgccg

SEQ ID NO: 3920 - DNA, 22 bp, Homo Sapiens
aaaagatgagtatgcctgccgt

SEQ ID NO: 3921 - DNA, 22 bp, Homo Sapiens
caaattctgcttgcttgctttt

SEQ ID NO: 3922 - DNA, 22 bp, Homo Sapiens
aaattctgcttgcttgcttttt

SEQ ID NO: 3923 - DNA, 22 bp, Homo Sapiens
aattctgcttgcttgcttttta

SEQ ID NO: 3924 - DNA, 22 bp, Homo Sapiens
attctgcttgcttgctttttaa

SEQ ID NO: 3925 - DNA, 22 bp, Homo Sapiens
ttctgcttgcttgctttttaat

SEQ ID NO: 3926 - DNA, 22 bp, Homo Sapiens
tctgcttgcttgctttttaata

SEQ ID NO: 3927 - DNA, 22 bp, Homo Sapiens
ctgcttgcttgctttttaatat

SEQ ID NO: 3928 - DNA, 22 bp, Homo Sapiens
tgcttgcttgctttttaatatt

SEQ ID NO: 3929 - DNA, 22 bp, Homo Sapiens
gcttgcttgctttttaatattg

SEQ ID NO: 3930 - DNA, 22 bp, Homo Sapiens
cttgcttgctttttaatattga

SEQ ID NO: 3931 - DNA, 22 bp, Homo Sapiens
cacttacactttatgcacaaaa

SEQ ID NO: 3932 - DNA, 22 bp, Homo Sapiens
acttacactttatgcacaaaat

SEQ ID NO: 3933 - DNA, 22 bp, Homo Sapiens
cttacactttatgcacaaaatg

SEQ ID NO: 3934 - DNA, 22 bp, Homo Sapiens
ttacactttatgcacaaaatgt

SEQ ID NO: 3935 - DNA, 22 bp, Homo Sapiens
tacactttatgcacaaaatgta

SEQ ID NO: 3936 - DNA, 22 bp, Homo Sapiens
acactttatgcacaaaatgtag

SEQ ID NO: 3937 - DNA, 22 bp, Homo Sapiens
cactttatgcacaaaatgtagg

SEQ ID NO: 3938 - DNA, 22 bp, Homo Sapiens
actttatgcacaaaatgtaggg

SEQ ID NO: 3939 - DNA, 22 bp, Homo Sapiens
ctttatgcacaaaatgtagggt

SEQ ID NO: 3940 - DNA, 22 bp, Homo Sapiens
tttatgcacaaaatgtagggtt

SEQ ID NO: 3941 - DNA, 22 bp, Homo Sapiens
ttatgcacaaaatgtagggtta

SEQ ID NO: 3942 - DNA, 22 bp, Homo Sapiens
tatgcacaaaatgtagggttat

SEQ ID NO: 3943 - DNA, 22 bp, Homo Sapiens
atgcacaaaatgtagggttata

SEQ ID NO: 3944 - DNA, 22 bp, Homo Sapiens
tgcacaaaatgtagggttataa

SEQ ID NO: 3945 - DNA, 22 bp, Homo Sapiens
gcacaaaatgtagggttataat

SEQ ID NO: 3946 - DNA, 22 bp, Homo Sapiens
cacaaaatgtagggttataata

SEQ ID NO: 3947 - DNA, 22 bp, Homo Sapiens
gctggcaacttagaggtgggga

SEQ ID NO: 3948 - DNA, 22 bp, Homo Sapiens
ctggcaacttagaggtggggag

SEQ ID NO: 3949 - DNA, 22 bp, Homo Sapiens
tggcaacttagaggtggggagc

SEQ ID NO: 3950 - DNA, 22 bp, Homo Sapiens
ggcaacttagaggtggggagca

SEQ ID NO: 3951 - DNA, 22 bp, Homo Sapiens
gcaacttagaggtggggagcag

SEQ ID NO: 3952 - DNA, 22 bp, Homo Sapiens
caacttagaggtggggagcaga

SEQ ID NO: 3953 - DNA, 22 bp, Homo Sapiens
aacttagaggtggggagcagag

SEQ ID NO: 3954 - DNA, 22 bp, Homo Sapiens
acttagaggtggggagcagaga

SEQ ID NO: 3955 - DNA, 22 bp, Homo Sapiens
cttagaggtggggagcagagaa

SEQ ID NO: 3956 - DNA, 22 bp, Homo Sapiens
ttagaggtggggagcagagaat

SEQ ID NO: 3957 - DNA, 22 bp, Homo Sapiens
tagaggtggggagcagagaatt

SEQ ID NO: 3958 - DNA, 22 bp, Homo Sapiens
agaggtggggagcagagaattc

SEQ ID NO: 3959 - DNA, 22 bp, Homo Sapiens
gaggtggggagcagagaattct

SEQ ID NO: 3960 - DNA, 22 bp, Homo Sapiens
aggtggggagcagagaattctc

SEQ ID NO: 3961 - DNA, 22 bp, Homo Sapiens
ggtggggagcagagaattctct

SEQ ID NO: 3962 - DNA, 22 bp, Homo Sapiens
gtggggagcagagaattctctt

SEQ ID NO: 3963 - DNA, 22 bp, Homo Sapiens
tggggagcagagaattctctta

SEQ ID NO: 3964 - DNA, 22 bp, Homo Sapiens
ggggagcagagaattctcttat

SEQ ID NO: 3965 - DNA, 22 bp, Homo Sapiens
atactctgcttagaatttgggg

SEQ ID NO: 3966 - DNA, 22 bp, Homo Sapiens
tactctgcttagaatttggggg

SEQ ID NO: 3967 - DNA, 22 bp, Homo Sapiens
actctgcttagaatttggggga

SEQ ID NO: 3968 - DNA, 22 bp, Homo Sapiens
ctctgcttagaatttgggggaa

SEQ ID NO: 3969 - DNA, 22 bp, Homo Sapiens
tctgcttagaatttgggggaaa

SEQ ID NO: 3970 - DNA, 22 bp, Homo Sapiens
ctgcttagaatttgggggaaaa

SEQ ID NO: 3971 - DNA, 22 bp, Homo Sapiens
tgcttagaatttgggggaaaat

SEQ ID NO: 3972 - DNA, 22 bp, Homo Sapiens
gcttagaatttgggggaaaatt

SEQ ID NO: 3973 - DNA, 22 bp, Homo Sapiens
cttagaatttgggggaaaattt

SEQ ID NO: 3974 - DNA, 22 bp, Homo Sapiens
ttagaatttgggggaaaattta

SEQ ID NO: 3975 - DNA, 22 bp, Homo Sapiens
tagaatttgggggaaaatttag

SEQ ID NO: 3976 - DNA, 22 bp, Homo Sapiens
agaatttgggggaaaatttaga

SEQ ID NO: 3977 - DNA, 22 bp, Homo Sapiens
gaatttgggggaaaatttagaa

SEQ ID NO: 3978 - DNA, 22 bp, Homo Sapiens
aatttgggggaaaatttagaaa

SEQ ID NO: 3979 - DNA, 22 bp, Homo Sapiens
atttgggggaaaatttagaaat

SEQ ID NO: 3980 - DNA, 22 bp, Homo Sapiens
tttgggggaaaatttagaaata

SEQ ID NO: 3981 - DNA, 22 bp, Homo Sapiens
ttgggggaaaatttagaaatat

SEQ ID NO: 3982 - DNA, 22 bp, Homo Sapiens
tgggggaaaatttagaaatata

SEQ ID NO: 3983 - DNA, 22 bp, Homo Sapiens
gggggaaaatttagaaatataa

SEQ ID NO: 3984 - DNA, 22 bp, Homo Sapiens
tgtggttaatctggtttatttt

SEQ ID NO: 3985 - DNA, 22 bp, Homo Sapiens
gtggttaatctggtttattttt

SEQ ID NO: 3986 - DNA, 22 bp, Homo Sapiens
tggttaatctggtttatttttg

SEQ ID NO: 3987 - DNA, 22 bp, Homo Sapiens
ggttaatctggtttatttttgt

SEQ ID NO: 3988 - DNA, 22 bp, Homo Sapiens
taatctggtttatttttgttcc

SEQ ID NO: 3989 - DNA, 22 bp, Homo Sapiens
aatctggtttatttttgttcca

SEQ ID NO: 3990 - DNA, 22 bp, Homo Sapiens
atctggtttatttttgttccac

SEQ ID NO: 3991 - DNA, 22 bp, Homo Sapiens
tctggtttatttttgttccaca

SEQ ID NO: 3992 - DNA, 22 bp, Homo Sapiens
ctggtttatttttgttccacaa

SEQ ID NO: 3993 - DNA, 22 bp, Homo Sapiens
tggtttatttttgttccacaag

SEQ ID NO: 3994 - DNA, 22 bp, Homo Sapiens
ggtttatttttgttccacaagt

SEQ ID NO: 3995 - DNA, 22 bp, Homo Sapiens
gtttatttttgttccacaagtt

SEQ ID NO: 3996 - DNA, 18 bp, Homo Sapiens
agctgacagcattcgggc

SEQ ID NO: 3997 - DNA, 18 bp, Homo Sapiens
gctgacagcattcgggcc

SEQ ID NO: 3998 - DNA, 18 bp, Homo Sapiens
ctgacagcattcgggccg

SEQ ID NO: 3999 - DNA, 18 bp, Homo Sapiens
tgacagcattcgggccga

SEQ ID NO: 4000 - DNA, 18 bp, Homo Sapiens
gacagcattcgggccgag

SEQ ID NO: 4001 - DNA, 18 bp, Homo Sapiens
acagcattcgggccgaga

SEQ ID NO: 4002 - DNA, 18 bp, Homo Sapiens
cagcattcgggccgagat

SEQ ID NO: 4003 - DNA, 18 bp, Homo Sapiens
agcattcgggccgagatg

SEQ ID NO: 4004 - DNA, 18 bp, Homo Sapiens
gcattcgggccgagatgt

SEQ ID NO: 4005 - DNA, 18 bp, Homo Sapiens
cattcgggccgagatgtc

SEQ ID NO: 4006 - DNA, 18 bp, Homo Sapiens
ttcgggccgagatgtctc

SEQ ID NO: 4007 - DNA, 18 bp, Homo Sapiens
tcgggccgagatgtctcg

SEQ ID NO: 4008 - DNA, 18 bp, Homo Sapiens
cgggccgagatgtctcgc

SEQ ID NO: 4009 - DNA, 18 bp, Homo Sapiens
gggccgagatgtctcgct

SEQ ID NO: 4010 - DNA, 18 bp, Homo Sapiens
ggccgagatgtctcgctc

SEQ ID NO: 4011 - DNA, 18 bp, Homo Sapiens
gccgagatgtctcgctcc

SEQ ID NO: 4012 - DNA, 18 bp, Homo Sapiens
ccgagatgtctcgctccg

SEQ ID NO: 4013 - DNA, 18 bp, Homo Sapiens
cgagatgtctcgctccgt

SEQ ID NO: 4014 - DNA, 18 bp, Homo Sapiens
gagatgtctcgctccgtg

SEQ ID NO: 4015 - DNA, 18 bp, Homo Sapiens
agatgtctcgctccgtgg

SEQ ID NO: 4016 - DNA, 18 bp, Homo Sapiens
gatgtctcgctccgtggc

SEQ ID NO: 4017 - DNA, 18 bp, Homo Sapiens
atgtctcgctccgtggcc

SEQ ID NO: 4018 - DNA, 18 bp, Homo Sapiens
tgtctcgctccgtggcct

SEQ ID NO: 4019 - DNA, 18 bp, Homo Sapiens
gtctcgctccgtggcctt

SEQ ID NO: 4020 - DNA, 18 bp, Homo Sapiens
tctcgctccgtggcctta

SEQ ID NO: 4021 - DNA, 18 bp, Homo Sapiens
ctcgctccgtggccttag

SEQ ID NO: 4022 - DNA, 18 bp, Homo Sapiens
tcgctccgtggccttagc

SEQ ID NO: 4023 - DNA, 18 bp, Homo Sapiens
cgctccgtggccttagct

SEQ ID NO: 4024 - DNA, 18 bp, Homo Sapiens
gctccgtggccttagctg

SEQ ID NO: 4025 - DNA, 18 bp, Homo Sapiens
ctccgtggccttagctgt

SEQ ID NO: 4026 - DNA, 18 bp, Homo Sapiens
tccgtggccttagctgtg

SEQ ID NO: 4027 - DNA, 18 bp, Homo Sapiens
ccgtggccttagctgtgc

SEQ ID NO: 4028 - DNA, 18 bp, Homo Sapiens
cgtggccttagctgtgct

SEQ ID NO: 4029 - DNA, 18 bp, Homo Sapiens
gtggccttagctgtgctc

SEQ ID NO: 4030 - DNA, 18 bp, Homo Sapiens
tggccttagctgtgctcg

SEQ ID NO: 4031 - DNA, 18 bp, Homo Sapiens
ggccttagctgtgctcgc

SEQ ID NO: 4032 - DNA, 18 bp, Homo Sapiens
gccttagctgtgctcgcg

SEQ ID NO: 4033 - DNA, 18 bp, Homo Sapiens
ccttagctgtgctcgcgc

SEQ ID NO: 4034 - DNA, 18 bp, Homo Sapiens
cttagctgtgctcgcgct

SEQ ID NO: 4035 - DNA, 18 bp, Homo Sapiens
tagctgtgctcgcgctac

SEQ ID NO: 4036 - DNA, 18 bp, Homo Sapiens
agctgtgctcgcgctact

SEQ ID NO: 4037 - DNA, 18 bp, Homo Sapiens
gctgtgctcgcgctactc

SEQ ID NO: 4038 - DNA, 18 bp, Homo Sapiens
ctgtgctcgcgctactct

SEQ ID NO: 4039 - DNA, 18 bp, Homo Sapiens
tgtgctcgcgctactctc

SEQ ID NO: 4040 - DNA, 18 bp, Homo Sapiens
gtgctcgcgctactctct

SEQ ID NO: 4041 - DNA, 18 bp, Homo Sapiens
tgctcgcgctactctctc

SEQ ID NO: 4042 - DNA, 18 bp, Homo Sapiens
gctcgcgctactctctct

SEQ ID NO: 4043 - DNA, 18 bp, Homo Sapiens
ctctttctggcctggagg

SEQ ID NO: 4044 - DNA, 18 bp, Homo Sapiens
tctttctggcctggaggc

SEQ ID NO: 4045 - DNA, 18 bp, Homo Sapiens
ctttctggcctggaggct

SEQ ID NO: 4046 - DNA, 18 bp, Homo Sapiens
tctggcctggaggctatc

SEQ ID NO: 4047 - DNA, 18 bp, Homo Sapiens
ctggcctggaggctatcc

SEQ ID NO: 4048 - DNA, 18 bp, Homo Sapiens
tggcctggaggctatcca

SEQ ID NO: 4049 - DNA, 18 bp, Homo Sapiens
ggcctggaggctatccag

SEQ ID NO: 4050 - DNA, 18 bp, Homo Sapiens
gcctggaggctatccagc

SEQ ID NO: 4051 - DNA, 18 bp, Homo Sapiens
cctggaggctatccagcg

SEQ ID NO: 4052 - DNA, 18 bp, Homo Sapiens
ctggaggctatccagcgt

SEQ ID NO: 4053 - DNA, 18 bp, Homo Sapiens
ggaggctatccagcgtac

SEQ ID NO: 4054 - DNA, 18 bp, Homo Sapiens
ggctatccagcgtactcc

SEQ ID NO: 4055 - DNA, 18 bp, Homo Sapiens
gagtatgcctgccgtgtg

SEQ ID NO: 4056 - DNA, 18 bp, Homo Sapiens
atgcctgccgtgtgaacc

SEQ ID NO: 4057 - DNA, 18 bp, Homo Sapiens
tgcctgccgtgtgaacca

SEQ ID NO: 4058 - DNA, 18 bp, Homo Sapiens
gcctgccgtgtgaaccat

SEQ ID NO: 4059 - DNA, 18 bp, Homo Sapiens
cctgccgtgtgaaccatg

SEQ ID NO: 4060 - DNA, 18 bp, Homo Sapiens
ttgcttgctttttaatat

SEQ ID NO: 4061 - DNA, 18 bp, Homo Sapiens
tgcttgctttttaatatt

SEQ ID NO: 4062 - DNA, 18 bp, Homo Sapiens
cttgctttttaatattga

SEQ ID NO: 4063 - DNA, 18 bp, Homo Sapiens
ttgctttttaatattgat

SEQ ID NO: 4064 - DNA, 18 bp, Homo Sapiens
tgctttttaatattgata

SEQ ID NO: 4065 - DNA, 18 bp, Homo Sapiens
gctttttaatattgatat

SEQ ID NO: 4066 - DNA, 18 bp, Homo Sapiens
ctttttaatattgatatg

SEQ ID NO: 4067 - DNA, 18 bp, Homo Sapiens
tttttaatattgatatgc

SEQ ID NO: 4068 - DNA, 18 bp, Homo Sapiens
ttttaatattgatatgct

SEQ ID NO: 4069 - DNA, 18 bp, Homo Sapiens
tttaatattgatatgctt

SEQ ID NO: 4070 - DNA, 18 bp, Homo Sapiens
ttaatattgatatgctta

SEQ ID NO: 4071 - DNA, 18 bp, Homo Sapiens
taatattgatatgcttat

SEQ ID NO: 4072 - DNA, 18 bp, Homo Sapiens
aatattgatatgcttata

SEQ ID NO: 4073 - DNA, 18 bp, Homo Sapiens
atattgatatgcttatac

SEQ ID NO: 4074 - DNA, 18 bp, Homo Sapiens
tattgatatgcttataca

SEQ ID NO: 4075 - DNA, 18 bp, Homo Sapiens
ttatacacttacacttta

SEQ ID NO: 4076 - DNA, 18 bp, Homo Sapiens
tatacacttacactttat

SEQ ID NO: 4077 - DNA, 18 bp, Homo Sapiens
aaaatgtagggttataat

SEQ ID NO: 4078 - DNA, 18 bp, Homo Sapiens
aaatgtagggttataata

SEQ ID NO: 4079 - DNA, 18 bp, Homo Sapiens
aatgtagggttataataa

SEQ ID NO: 4080 - DNA, 18 bp, Homo Sapiens
atgtagggttataataat

SEQ ID NO: 4081 - DNA, 18 bp, Homo Sapiens
tagggttataataatgtt

SEQ ID NO: 4082 - DNA, 18 bp, Homo Sapiens
agggttataataatgtta

SEQ ID NO: 4083 - DNA, 18 bp, Homo Sapiens
gggttataataatgttaa

SEQ ID NO: 4084 - DNA, 18 bp, Homo Sapiens
ggttataataatgttaac

SEQ ID NO: 4085 - DNA, 18 bp, Homo Sapiens
gttataataatgttaaca

SEQ ID NO: 4086 - DNA, 18 bp, Homo Sapiens
ttataataatgttaacat

SEQ ID NO: 4087 - DNA, 18 bp, Homo Sapiens
tataataatgttaacatg

SEQ ID NO: 4088 - DNA, 18 bp, Homo Sapiens
ataataatgttaacatgg

SEQ ID NO: 4089 - DNA, 18 bp, Homo Sapiens
taataatgttaacatgga

SEQ ID NO: 4090 - DNA, 18 bp, Homo Sapiens
acatgatcttctttataa

SEQ ID NO: 4091 - DNA, 18 bp, Homo Sapiens
catgatcttctttataat

SEQ ID NO: 4092 - DNA, 18 bp, Homo Sapiens
atgatcttctttataatt

SEQ ID NO: 4093 - DNA, 18 bp, Homo Sapiens
tgatcttctttataattc

SEQ ID NO: 4094 - DNA, 18 bp, Homo Sapiens
gatcttctttataattct

SEQ ID NO: 4095 - DNA, 18 bp, Homo Sapiens
atcttctttataattcta

SEQ ID NO: 4096 - DNA, 18 bp, Homo Sapiens
tcttctttataattctac

SEQ ID NO: 4097 - DNA, 18 bp, Homo Sapiens
cttctttataattctact

SEQ ID NO: 4098 - DNA, 18 bp, Homo Sapiens
ttctttataattctactt

SEQ ID NO: 4099 - DNA, 18 bp, Homo Sapiens
tctttataattctacttt

SEQ ID NO: 4100 - DNA, 18 bp, Homo Sapiens
ctttataattctactttg

SEQ ID NO: 4101 - DNA, 18 bp, Homo Sapiens
tttataattctactttga

SEQ ID NO: 4102 - DNA, 18 bp, Homo Sapiens
ttataattctactttgag

SEQ ID NO: 4103 - DNA, 18 bp, Homo Sapiens
tataattctactttgagt

SEQ ID NO: 4104 - DNA, 18 bp, Homo Sapiens
ctgagcaggttgctccac

SEQ ID NO: 4105 - DNA, 18 bp, Homo Sapiens
gagcaggttgctccacag

SEQ ID NO: 4106 - DNA, 18 bp, Homo Sapiens
agcaggttgctccacagg

SEQ ID NO: 4107 - DNA, 18 bp, Homo Sapiens
gcaggttgctccacaggt

SEQ ID NO: 4108 - DNA, 18 bp, Homo Sapiens
ggttgctccacaggtagc

SEQ ID NO: 4109 - DNA, 18 bp, Homo Sapiens
caggtagctctaggaggg

SEQ ID NO: 4110 - DNA, 18 bp, Homo Sapiens
aggtagctctaggagggc

SEQ ID NO: 4111 - DNA, 18 bp, Homo Sapiens
ggtagctctaggagggct

SEQ ID NO: 4112 - DNA, 18 bp, Homo Sapiens
gtagctctaggagggctg

SEQ ID NO: 4113 - DNA, 18 bp, Homo Sapiens
tagctctaggagggctgg

SEQ ID NO: 4114 - DNA, 18 bp, Homo Sapiens
agctctaggagggctggc

SEQ ID NO: 4115 - DNA, 18 bp, Homo Sapiens
gctctaggagggctggca

SEQ ID NO: 4116 - DNA, 18 bp, Homo Sapiens
ctctaggagggctggcaa

SEQ ID NO: 4117 - DNA, 18 bp, Homo Sapiens
tctaggagggctggcaac

SEQ ID NO: 4118 - DNA, 18 bp, Homo Sapiens
ctaggagggctggcaact

SEQ ID NO: 4119 - DNA, 18 bp, Homo Sapiens
ggagggctggcaacttag

SEQ ID NO: 4120 - DNA, 18 bp, Homo Sapiens
gggctggcaacttagagg

SEQ ID NO: 4121 - DNA, 18 bp, Homo Sapiens
ggcaacttagaggtgggg

SEQ ID NO: 4122 - DNA, 18 bp, Homo Sapiens
cttagaggtggggagcag

SEQ ID NO: 4123 - DNA, 18 bp, Homo Sapiens
tagaggtggggagcagag

SEQ ID NO: 4124 - DNA, 18 bp, Homo Sapiens
agaggtggggagcagaga

SEQ ID NO: 4125 - DNA, 18 bp, Homo Sapiens
gaggtggggagcagagaa

SEQ ID NO: 4126 - DNA, 18 bp, Homo Sapiens
ataagttaacttccaatt

SEQ ID NO: 4127 - DNA, 18 bp, Homo Sapiens
taagttaacttccaattt

SEQ ID NO: 4128 - DNA, 18 bp, Homo Sapiens
aagttaacttccaattta

SEQ ID NO: 4129 - DNA, 18 bp, Homo Sapiens
ttaacttccaatttacat

SEQ ID NO: 4130 - DNA, 18 bp, Homo Sapiens
taacttccaatttacata

SEQ ID NO: 4131 - DNA, 18 bp, Homo Sapiens
gggaaaatttagaaatat

SEQ ID NO: 4132 - DNA, 18 bp, Homo Sapiens
ggaaaatttagaaatata

SEQ ID NO: 4133 - DNA, 18 bp, Homo Sapiens
gaaaatttagaaatataa

SEQ ID NO: 4134 - DNA, 18 bp, Homo Sapiens
aaaatttagaaatataat

SEQ ID NO: 4135 - DNA, 18 bp, Homo Sapiens
aaatttagaaatataatt

SEQ ID NO: 4136 - DNA, 18 bp, Homo Sapiens
aatttagaaatataattg

SEQ ID NO: 4137 - DNA, 18 bp, Homo Sapiens
atttagaaatataattga

SEQ ID NO: 4138 - DNA, 18 bp, Homo Sapiens
tttagaaatataattgac

SEQ ID NO: 4139 - DNA, 18 bp, Homo Sapiens
ttagaaatataattgaca

SEQ ID NO: 4140 - DNA, 18 bp, Homo Sapiens
tagaaatataattgacag

SEQ ID NO: 4141 - DNA, 18 bp, Homo Sapiens
aaatataattgacaggat

SEQ ID NO: 4142 - DNA, 18 bp, Homo Sapiens
aatataattgacaggatt

SEQ ID NO: 4143 - DNA, 18 bp, Homo Sapiens
atataattgacaggatta

SEQ ID NO: 4144 - DNA, 18 bp, Homo Sapiens
tataattgacaggattat

SEQ ID NO: 4145 - DNA, 18 bp, Homo Sapiens
ataattgacaggattatt

SEQ ID NO: 4146 - DNA, 18 bp, Homo Sapiens
gattattggaaatttgtt

SEQ ID NO: 4147 - DNA, 18 bp, Homo Sapiens
attattggaaatttgtta

SEQ ID NO: 4148 - DNA, 18 bp, Homo Sapiens
ttattggaaatttgttat

SEQ ID NO: 4149 - DNA, 18 bp, Homo Sapiens
tattggaaatttgttata

SEQ ID NO: 4150 - DNA, 18 bp, Homo Sapiens
attggaaatttgttataa

SEQ ID NO: 4151 - DNA, 18 bp, Homo Sapiens
ttggaaatttgttataat

SEQ ID NO: 4152 - DNA, 18 bp, Homo Sapiens
tggaaatttgttataatg

SEQ ID NO: 4153 - DNA, 18 bp, Homo Sapiens
ggaaatttgttataatga

SEQ ID NO: 4154 - DNA, 18 bp, Homo Sapiens
gaaatttgttataatgaa

SEQ ID NO: 4155 - DNA, 18 bp, Homo Sapiens
aaatttgttataatgaat

SEQ ID NO: 4156 - DNA, 18 bp, Homo Sapiens
aatttgttataatgaatg

SEQ ID NO: 4157 - DNA, 18 bp, Homo Sapiens
atttgttataatgaatga

SEQ ID NO: 4158 - DNA, 18 bp, Homo Sapiens
tttgttataatgaatgaa

SEQ ID NO: 4159 - DNA, 18 bp, Homo Sapiens
ttgttataatgaatgaaa

SEQ ID NO: 4160 - DNA, 18 bp, Homo Sapiens
tgttataatgaatgaaac

SEQ ID NO: 4161 - DNA, 18 bp, Homo Sapiens
gttataatgaatgaaaca

SEQ ID NO: 4162 - DNA, 18 bp, Homo Sapiens
ttataatgaatgaaacat

SEQ ID NO: 4163 - DNA, 18 bp, Homo Sapiens
tataatgaatgaaacatt

SEQ ID NO: 4164 - DNA, 18 bp, Homo Sapiens
ataatgaatgaaacattt

SEQ ID NO: 4165 - DNA, 18 bp, Homo Sapiens
taatgaatgaaacatttt

SEQ ID NO: 4166 - DNA, 18 bp, Homo Sapiens
aatgaatgaaacattttg

SEQ ID NO: 4167 - DNA, 18 bp, Homo Sapiens
atgaatgaaacattttgt

SEQ ID NO: 4168 - DNA, 18 bp, Homo Sapiens
aatgaaacattttgtcat

SEQ ID NO: 4169 - DNA, 18 bp, Homo Sapiens
atgaaacattttgtcata

SEQ ID NO: 4170 - DNA, 18 bp, Homo Sapiens
tgaaacattttgtcatat

SEQ ID NO: 4171 - DNA, 18 bp, Homo Sapiens
gaaacattttgtcatata

SEQ ID NO: 4172 - DNA, 18 bp, Homo Sapiens
aaacattttgtcatataa

SEQ ID NO: 4173 - DNA, 18 bp, Homo Sapiens
aacattttgtcatataag

SEQ ID NO: 4174 - DNA, 18 bp, Homo Sapiens
acattttgtcatataaga

SEQ ID NO: 4175 - DNA, 18 bp, Homo Sapiens
cattttgtcatataagat

SEQ ID NO: 4176 - DNA, 18 bp, Homo Sapiens
attttgtcatataagatt

SEQ ID NO: 4177 - DNA, 18 bp, Homo Sapiens
ttttgtcatataagattc

SEQ ID NO: 4178 - DNA, 18 bp, Homo Sapiens
tttgtcatataagattca

SEQ ID NO: 4179 - DNA, 18 bp, Homo Sapiens
ttgtcatataagattcat

SEQ ID NO: 4180 - DNA, 18 bp, Homo Sapiens
tgtcatataagattcata

SEQ ID NO: 4181 - DNA, 18 bp, Homo Sapiens
gtcatataagattcatat

SEQ ID NO: 4182 - DNA, 18 bp, Homo Sapiens
tcatataagattcatatt

SEQ ID NO: 4183 - DNA, 18 bp, Homo Sapiens
catataagattcatattt

SEQ ID NO: 4184 - DNA, 18 bp, Homo Sapiens
atataagattcatattta

SEQ ID NO: 4185 - DNA, 18 bp, Homo Sapiens
tataagattcatatttac

SEQ ID NO: 4186 - DNA, 18 bp, Homo Sapiens
ataagattcatatttact

SEQ ID NO: 4187 - DNA, 18 bp, Homo Sapiens
taagattcatatttactt

SEQ ID NO: 4188 - DNA, 18 bp, Homo Sapiens
aagattcatatttacttc

SEQ ID NO: 4189 - DNA, 18 bp, Homo Sapiens
agattcatatttacttct

SEQ ID NO: 4190 - DNA, 18 bp, Homo Sapiens
gattcatatttacttctt

SEQ ID NO: 4191 - DNA, 18 bp, Homo Sapiens
attcatatttacttctta

SEQ ID NO: 4192 - DNA, 18 bp, Homo Sapiens
ttcatatttacttcttat

SEQ ID NO: 4193 - DNA, 18 bp, Homo Sapiens
tcatatttacttcttata

SEQ ID NO: 4194 - DNA, 18 bp, Homo Sapiens
catatttacttcttatac

SEQ ID NO: 4195 - DNA, 18 bp, Homo Sapiens
atatttacttcttataca

SEQ ID NO: 4196 - DNA, 18 bp, Homo Sapiens
tatttacttcttatacat

SEQ ID NO: 4197 - DNA, 18 bp, Homo Sapiens
atttacttcttatacatt

SEQ ID NO: 4198 - DNA, 18 bp, Homo Sapiens
tttacttcttatacattt

SEQ ID NO: 4199 - DNA, 18 bp, Homo Sapiens
ttacttcttatacatttg

SEQ ID NO: 4200 - DNA, 18 bp, Homo Sapiens
tacttcttatacatttga

SEQ ID NO: 4201 - DNA, 18 bp, Homo Sapiens
acttcttatacatttgat

SEQ ID NO: 4202 - DNA, 18 bp, Homo Sapiens
cttcttatacatttgata

SEQ ID NO: 4203 - DNA, 18 bp, Homo Sapiens
ttcttatacatttgataa

SEQ ID NO: 4204 - DNA, 18 bp, Homo Sapiens
tcttatacatttgataaa

SEQ ID NO: 4205 - DNA, 18 bp, Homo Sapiens
cttatacatttgataaag

SEQ ID NO: 4206 - DNA, 18 bp, Homo Sapiens
ttatacatttgataaagt

SEQ ID NO: 4207 - DNA, 18 bp, Homo Sapiens
tatacatttgataaagta

SEQ ID NO: 4208 - DNA, 18 bp, Homo Sapiens
atacatttgataaagtaa

SEQ ID NO: 4209 - DNA, 18 bp, Homo Sapiens
tacatttgataaagtaag

SEQ ID NO: 4210 - DNA, 18 bp, Homo Sapiens
gttaatctggtttatttt

SEQ ID NO: 4211 - DNA, 18 bp, Homo Sapiens
ttaatctggtttattttt

SEQ ID NO: 4212 - DNA, 18 bp, Homo Sapiens
taatctggtttatttttg

SEQ ID NO: 4213 - DNA, 18 bp, Homo Sapiens
aatctggtttatttttgt

SEQ ID NO: 4214 - DNA, 18 bp, Homo Sapiens
atctggtttatttttgtt

SEQ ID NO: 4215 - DNA, 18 bp, Homo Sapiens
tttatttttgttccacaa

SEQ ID NO: 4216 - DNA, 18 bp, Homo Sapiens
ttccacaagttaaataaa

SEQ ID NO: 4217 - DNA, 18 bp, Homo Sapiens
tccacaagttaaataaat

SEQ ID NO: 4218 - DNA, 18 bp, Homo Sapiens
cacaagttaaataaatca

SEQ ID NO: 4219 - DNA, 18 bp, Homo Sapiens
acaagttaaataaatcat

SEQ ID NO: 4220 - DNA, 18 bp, Homo Sapiens
caagttaaataaatcata

SEQ ID NO: 4221 - DNA, 18 bp, Homo Sapiens
aagttaaataaatcataa

SEQ ID NO: 4222 - DNA, 18 bp, Homo Sapiens
agttaaataaatcataaa

SEQ ID NO: 4223 - DNA, 18 bp, Homo Sapiens
gttaaataaatcataaaa

SEQ ID NO: 4224 - DNA, 18 bp, Homo Sapiens
ttaaataaatcataaaac

SEQ ID NO: 4225 - DNA, 18 bp, Homo Sapiens
taaataaatcataaaact

SEQ ID NO: 4226 - DNA, 18 bp, Homo Sapiens
aaataaatcataaaactt

SEQ ID NO: 4227 - DNA, 18 bp, Homo Sapiens
aataaatcataaaacttg

SEQ ID NO: 4228 - DNA, 18 bp, Homo Sapiens
ataaatcataaaacttga

SEQ ID NO: 4229 - DNA, 19 bp, Homo Sapiens
agctgacagcattcgggcc

SEQ ID NO: 4230 - DNA, 19 bp, Homo Sapiens
gctgacagcattcgggccg

SEQ ID NO: 4231 - DNA, 19 bp, Homo Sapiens
ctgacagcattcgggccga

SEQ ID NO: 4232 - DNA, 19 bp, Homo Sapiens
tgacagcattcgggccgag

SEQ ID NO: 4233 - DNA, 19 bp, Homo Sapiens
gacagcattcgggccgaga

SEQ ID NO: 4234 - DNA, 19 bp, Homo Sapiens
cagcattcgggccgagatg

SEQ ID NO: 4235 - DNA, 19 bp, Homo Sapiens
gcattcgggccgagatgtc

SEQ ID NO: 4236 - DNA, 19 bp, Homo Sapiens
ttcgggccgagatgtctcg

SEQ ID NO: 4237 - DNA, 19 bp, Homo Sapiens
tcgggccgagatgtctcgc

SEQ ID NO: 4238 - DNA, 19 bp, Homo Sapiens
cgggccgagatgtctcgct

SEQ ID NO: 4239 - DNA, 19 bp, Homo Sapiens
gggccgagatgtctcgctc

SEQ ID NO: 4240 - DNA, 19 bp, Homo Sapiens
ggccgagatgtctcgctcc

SEQ ID NO: 4241 - DNA, 19 bp, Homo Sapiens
gccgagatgtctcgctccg

SEQ ID NO: 4242 - DNA, 19 bp, Homo Sapiens
ccgagatgtctcgctccgt

SEQ ID NO: 4243 - DNA, 19 bp, Homo Sapiens
cgagatgtctcgctccgtg

SEQ ID NO: 4244 - DNA, 19 bp, Homo Sapiens
gagatgtctcgctccgtgg

SEQ ID NO: 4245 - DNA, 19 bp, Homo Sapiens
agatgtctcgctccgtggc

SEQ ID NO: 4246 - DNA, 19 bp, Homo Sapiens
gatgtctcgctccgtggcc

SEQ ID NO: 4247 - DNA, 19 bp, Homo Sapiens
atgtctcgctccgtggcct

SEQ ID NO: 4248 - DNA, 19 bp, Homo Sapiens
tgtctcgctccgtggcctt

SEQ ID NO: 4249 - DNA, 19 bp, Homo Sapiens
gtctcgctccgtggcctta

SEQ ID NO: 4250 - DNA, 19 bp, Homo Sapiens
tctcgctccgtggccttag

SEQ ID NO: 4251 - DNA, 19 bp, Homo Sapiens
ctcgctccgtggccttagc

SEQ ID NO: 4252 - DNA, 19 bp, Homo Sapiens
tcgctccgtggccttagct

SEQ ID NO: 4253 - DNA, 19 bp, Homo Sapiens
cgctccgtggccttagctg

SEQ ID NO: 4254 - DNA, 19 bp, Homo Sapiens
gctccgtggccttagctgt

SEQ ID NO: 4255 - DNA, 19 bp, Homo Sapiens
ctccgtggccttagctgtg

SEQ ID NO: 4256 - DNA, 19 bp, Homo Sapiens
tccgtggccttagctgtgc

SEQ ID NO: 4257 - DNA, 19 bp, Homo Sapiens
ccgtggccttagctgtgct

SEQ ID NO: 4258 - DNA, 19 bp, Homo Sapiens
cgtggccttagctgtgctc

SEQ ID NO: 4259 - DNA, 19 bp, Homo Sapiens
gtggccttagctgtgctcg

SEQ ID NO: 4260 - DNA, 19 bp, Homo Sapiens
tggccttagctgtgctcgc

SEQ ID NO: 4261 - DNA, 19 bp, Homo Sapiens
ggccttagctgtgctcgcg

SEQ ID NO: 4262 - DNA, 19 bp, Homo Sapiens
gccttagctgtgctcgcgc

SEQ ID NO: 4263 - DNA, 19 bp, Homo Sapiens
ccttagctgtgctcgcgct

SEQ ID NO: 4264 - DNA, 19 bp, Homo Sapiens
agctgtgctcgcgctactc

SEQ ID NO: 4265 - DNA, 19 bp, Homo Sapiens
gctgtgctcgcgctactct

SEQ ID NO: 4266 - DNA, 19 bp, Homo Sapiens
ctgtgctcgcgctactctc

SEQ ID NO: 4267 - DNA, 19 bp, Homo Sapiens
gtgctcgcgctactctctc

SEQ ID NO: 4268 - DNA, 19 bp, Homo Sapiens
ctctttctggcctggaggc

SEQ ID NO: 4269 - DNA, 19 bp, Homo Sapiens
tctggcctggaggctatcc

SEQ ID NO: 4270 - DNA, 19 bp, Homo Sapiens
ctggcctggaggctatcca

SEQ ID NO: 4271 - DNA, 19 bp, Homo Sapiens
tggcctggaggctatccag

SEQ ID NO: 4272 - DNA, 19 bp, Homo Sapiens
ggcctggaggctatccagc

SEQ ID NO: 4273 - DNA, 19 bp, Homo Sapiens
gcctggaggctatccagcg

SEQ ID NO: 4274 - DNA, 19 bp, Homo Sapiens
cctggaggctatccagcgt

SEQ ID NO: 4275 - DNA, 19 bp, Homo Sapiens
gcctgccgtgtgaaccatg

SEQ ID NO: 4276 - DNA, 19 bp, Homo Sapiens
ttgcttgctttttaatatt

SEQ ID NO: 4277 - DNA, 19 bp, Homo Sapiens
cttgctttttaatattgat

SEQ ID NO: 4278 - DNA, 19 bp, Homo Sapiens
ttgctttttaatattgata

SEQ ID NO: 4279 - DNA, 19 bp, Homo Sapiens
tgctttttaatattgatat

SEQ ID NO: 4280 - DNA, 19 bp, Homo Sapiens
gctttttaatattgatatg

SEQ ID NO: 4281 - DNA, 19 bp, Homo Sapiens
ctttttaatattgatatgc

SEQ ID NO: 4282 - DNA, 19 bp, Homo Sapiens
tttttaatattgatatgct

SEQ ID NO: 4283 - DNA, 19 bp, Homo Sapiens
ttttaatattgatatgctt

SEQ ID NO: 4284 - DNA, 19 bp, Homo Sapiens
tttaatattgatatgctta

SEQ ID NO: 4285 - DNA, 19 bp, Homo Sapiens
ttaatattgatatgcttat

SEQ ID NO: 4286 - DNA, 19 bp, Homo Sapiens
taatattgatatgcttata

SEQ ID NO: 4287 - DNA, 19 bp, Homo Sapiens
aatattgatatgcttatac

SEQ ID NO: 4288 - DNA, 19 bp, Homo Sapiens
atattgatatgcttataca

SEQ ID NO: 4289 - DNA, 19 bp, Homo Sapiens
ttatacacttacactttat

SEQ ID NO: 4290 - DNA, 19 bp, Homo Sapiens
aaaatgtagggttataata

SEQ ID NO: 4291 - DNA, 19 bp, Homo Sapiens
aaatgtagggttataataa

SEQ ID NO: 4292 - DNA, 19 bp, Homo Sapiens
aatgtagggttataataat

SEQ ID NO: 4293 - DNA, 19 bp, Homo Sapiens
tagggttataataatgtta

SEQ ID NO: 4294 - DNA, 19 bp, Homo Sapiens
agggttataataatgttaa

SEQ ID NO: 4295 - DNA, 19 bp, Homo Sapiens
ggttataataatgttaaca

SEQ ID NO: 4296 - DNA, 19 bp, Homo Sapiens
gttataataatgttaacat

SEQ ID NO: 4297 - DNA, 19 bp, Homo Sapiens
ttataataatgttaacatg

SEQ ID NO: 4298 - DNA, 19 bp, Homo Sapiens
tataataatgttaacatgg

SEQ ID NO: 4299 - DNA, 19 bp, Homo Sapiens
ataataatgttaacatgga

SEQ ID NO: 4300 - DNA, 19 bp, Homo Sapiens
acatgatcttctttataat

SEQ ID NO: 4301 - DNA, 19 bp, Homo Sapiens
catgatcttctttataatt

SEQ ID NO: 4302 - DNA, 19 bp, Homo Sapiens
atgatcttctttataattc

SEQ ID NO: 4303 - DNA, 19 bp, Homo Sapiens
tgatcttctttataattct

SEQ ID NO: 4304 - DNA, 19 bp, Homo Sapiens
gatcttctttataattcta

SEQ ID NO: 4305 - DNA, 19 bp, Homo Sapiens
atcttctttataattctac

SEQ ID NO: 4306 - DNA, 19 bp, Homo Sapiens
tcttctttataattctact

SEQ ID NO: 4307 - DNA, 19 bp, Homo Sapiens
cttctttataattctactt

SEQ ID NO: 4308 - DNA, 19 bp, Homo Sapiens
ttctttataattctacttt

SEQ ID NO: 4309 - DNA, 19 bp, Homo Sapiens
tctttataattctactttg

SEQ ID NO: 4310 - DNA, 19 bp, Homo Sapiens
ctttataattctactttga

SEQ ID NO: 4311 - DNA, 19 bp, Homo Sapiens
tttataattctactttgag

SEQ ID NO: 4312 - DNA, 19 bp, Homo Sapiens
ttataattctactttgagt

SEQ ID NO: 4313 - DNA, 19 bp, Homo Sapiens
gagcaggttgctccacagg

SEQ ID NO: 4314 - DNA, 19 bp, Homo Sapiens
caggtagctctaggagggc

SEQ ID NO: 4315 - DNA, 19 bp, Homo Sapiens
ggtagctctaggagggctg

SEQ ID NO: 4316 - DNA, 19 bp, Homo Sapiens
gtagctctaggagggctgg

SEQ ID NO: 4317 - DNA, 19 bp, Homo Sapiens
tagctctaggagggctggc

SEQ ID NO: 4318 - DNA, 19 bp, Homo Sapiens
agctctaggagggctggca

SEQ ID NO: 4319 - DNA, 19 bp, Homo Sapiens
gctctaggagggctggcaa

SEQ ID NO: 4320 - DNA, 19 bp, Homo Sapiens
ctctaggagggctggcaac

SEQ ID NO: 4321 - DNA, 19 bp, Homo Sapiens
ataagttaacttccaattt

SEQ ID NO: 4322 - DNA, 19 bp, Homo Sapiens
taagttaacttccaattta

SEQ ID NO: 4323 - DNA, 19 bp, Homo Sapiens
ttaacttccaatttacata

SEQ ID NO: 4324 - DNA, 19 bp, Homo Sapiens
gggaaaatttagaaatata

SEQ ID NO: 4325 - DNA, 19 bp, Homo Sapiens
ggaaaatttagaaatataa

SEQ ID NO: 4326 - DNA, 19 bp, Homo Sapiens
gaaaatttagaaatataat

SEQ ID NO: 4327 - DNA, 19 bp, Homo Sapiens
aaaatttagaaatataatt

SEQ ID NO: 4328 - DNA, 19 bp, Homo Sapiens
aaatttagaaatataattg

SEQ ID NO: 4329 - DNA, 19 bp, Homo Sapiens
aatttagaaatataattga

SEQ ID NO: 4330 - DNA, 19 bp, Homo Sapiens
atttagaaatataattgac

SEQ ID NO: 4331 - DNA, 19 bp, Homo Sapiens
tttagaaatataattgaca

SEQ ID NO: 4332 - DNA, 19 bp, Homo Sapiens
ttagaaatataattgacag

SEQ ID NO: 4333 - DNA, 19 bp, Homo Sapiens
aaatataattgacaggatt

SEQ ID NO: 4334 - DNA, 19 bp, Homo Sapiens
aatataattgacaggatta

SEQ ID NO: 4335 - DNA, 19 bp, Homo Sapiens
atataattgacaggattat

SEQ ID NO: 4336 - DNA, 19 bp, Homo Sapiens
tataattgacaggattatt

SEQ ID NO: 4337 - DNA, 19 bp, Homo Sapiens
gattattggaaatttgtta

SEQ ID NO: 4338 - DNA, 19 bp, Homo Sapiens
attattggaaatttgttat

SEQ ID NO: 4339 - DNA, 19 bp, Homo Sapiens
ttattggaaatttgttata

SEQ ID NO: 4340 - DNA, 19 bp, Homo Sapiens
tattggaaatttgttataa

SEQ ID NO: 4341 - DNA, 19 bp, Homo Sapiens
attggaaatttgttataat

SEQ ID NO: 4342 - DNA, 19 bp, Homo Sapiens
ttggaaatttgttataatg

SEQ ID NO: 4343 - DNA, 19 bp, Homo Sapiens
tggaaatttgttataatga

SEQ ID NO: 4344 - DNA, 19 bp, Homo Sapiens
ggaaatttgttataatgaa

SEQ ID NO: 4345 - DNA, 19 bp, Homo Sapiens
gaaatttgttataatgaat

SEQ ID NO: 4346 - DNA, 19 bp, Homo Sapiens
aaatttgttataatgaatg

SEQ ID NO: 4347 - DNA, 19 bp, Homo Sapiens
aatttgttataatgaatga

SEQ ID NO: 4348 - DNA, 19 bp, Homo Sapiens
atttgttataatgaatgaa

SEQ ID NO: 4349 - DNA, 19 bp, Homo Sapiens
tttgttataatgaatgaaa

SEQ ID NO: 4350 - DNA, 19 bp, Homo Sapiens
ttgttataatgaatgaaac

SEQ ID NO: 4351 - DNA, 19 bp, Homo Sapiens
tgttataatgaatgaaaca

SEQ ID NO: 4352 - DNA, 19 bp, Homo Sapiens
gttataatgaatgaaacat

SEQ ID NO: 4353 - DNA, 19 bp, Homo Sapiens
ttataatgaatgaaacatt

SEQ ID NO: 4354 - DNA, 19 bp, Homo Sapiens
tataatgaatgaaacattt

SEQ ID NO: 4355 - DNA, 19 bp, Homo Sapiens
ataatgaatgaaacatttt

SEQ ID NO: 4356 - DNA, 19 bp, Homo Sapiens
taatgaatgaaacattttg

SEQ ID NO: 4357 - DNA, 19 bp, Homo Sapiens
aatgaatgaaacattttgt

SEQ ID NO: 4358 - DNA, 19 bp, Homo Sapiens
aatgaaacattttgtcata

SEQ ID NO: 4359 - DNA, 19 bp, Homo Sapiens
atgaaacattttgtcatat

SEQ ID NO: 4360 - DNA, 19 bp, Homo Sapiens
tgaaacattttgtcatata

SEQ ID NO: 4361 - DNA, 19 bp, Homo Sapiens
gaaacattttgtcatataa

SEQ ID NO: 4362 - DNA, 19 bp, Homo Sapiens
aaacattttgtcatataag

SEQ ID NO: 4363 - DNA, 19 bp, Homo Sapiens
aacattttgtcatataaga

SEQ ID NO: 4364 - DNA, 19 bp, Homo Sapiens
acattttgtcatataagat

SEQ ID NO: 4365 - DNA, 19 bp, Homo Sapiens
cattttgtcatataagatt

SEQ ID NO: 4366 - DNA, 19 bp, Homo Sapiens
attttgtcatataagattc

SEQ ID NO: 4367 - DNA, 19 bp, Homo Sapiens
ttttgtcatataagattca

SEQ ID NO: 4368 - DNA, 19 bp, Homo Sapiens
tttgtcatataagattcat

SEQ ID NO: 4369 - DNA, 19 bp, Homo Sapiens
ttgtcatataagattcata

SEQ ID NO: 4370 - DNA, 19 bp, Homo Sapiens
tgtcatataagattcatat

SEQ ID NO: 4371 - DNA, 19 bp, Homo Sapiens
gtcatataagattcatatt

SEQ ID NO: 4372 - DNA, 19 bp, Homo Sapiens
tcatataagattcatattt

SEQ ID NO: 4373 - DNA, 19 bp, Homo Sapiens
catataagattcatattta

SEQ ID NO: 4374 - DNA, 19 bp, Homo Sapiens
atataagattcatatttac

SEQ ID NO: 4375 - DNA, 19 bp, Homo Sapiens
tataagattcatatttact

SEQ ID NO: 4376 - DNA, 19 bp, Homo Sapiens
ataagattcatatttactt

SEQ ID NO: 4377 - DNA, 19 bp, Homo Sapiens
taagattcatatttacttc

SEQ ID NO: 4378 - DNA, 19 bp, Homo Sapiens
aagattcatatttacttct

SEQ ID NO: 4379 - DNA, 19 bp, Homo Sapiens
agattcatatttacttctt

SEQ ID NO: 4380 - DNA, 19 bp, Homo Sapiens
gattcatatttacttctta

SEQ ID NO: 4381 - DNA, 19 bp, Homo Sapiens
attcatatttacttcttat

SEQ ID NO: 4382 - DNA, 19 bp, Homo Sapiens
ttcatatttacttcttata

SEQ ID NO: 4383 - DNA, 19 bp, Homo Sapiens
tcatatttacttcttatac

SEQ ID NO: 4384 - DNA, 19 bp, Homo Sapiens
catatttacttcttataca

SEQ ID NO: 4385 - DNA, 19 bp, Homo Sapiens
atatttacttcttatacat

SEQ ID NO: 4386 - DNA, 19 bp, Homo Sapiens
tatttacttcttatacatt

SEQ ID NO: 4387 - DNA, 19 bp, Homo Sapiens
atttacttcttatacattt

SEQ ID NO: 4388 - DNA, 19 bp, Homo Sapiens
tttacttcttatacatttg

SEQ ID NO: 4389 - DNA, 19 bp, Homo Sapiens
ttacttcttatacatttga

SEQ ID NO: 4390 - DNA, 19 bp, Homo Sapiens
tacttcttatacatttgat

SEQ ID NO: 4391 - DNA, 19 bp, Homo Sapiens
acttcttatacatttgata

SEQ ID NO: 4392 - DNA, 19 bp, Homo Sapiens
cttcttatacatttgataa

SEQ ID NO: 4393 - DNA, 19 bp, Homo Sapiens
ttcttatacatttgataaa

SEQ ID NO: 4394 - DNA, 19 bp, Homo Sapiens
tcttatacatttgataaag

SEQ ID NO: 4395 - DNA, 19 bp, Homo Sapiens
cttatacatttgataaagt

SEQ ID NO: 4396 - DNA, 19 bp, Homo Sapiens
ttatacatttgataaagta

SEQ ID NO: 4397 - DNA, 19 bp, Homo Sapiens
tatacatttgataaagtaa

SEQ ID NO: 4398 - DNA, 19 bp, Homo Sapiens
atacatttgataaagtaag

SEQ ID NO: 4399 - DNA, 19 bp, Homo Sapiens
gttaatctggtttattttt

SEQ ID NO: 4400 - DNA, 19 bp, Homo Sapiens
ttaatctggtttatttttg

SEQ ID NO: 4401 - DNA, 19 bp, Homo Sapiens
taatctggtttatttttgt

SEQ ID NO: 4402 - DNA, 19 bp, Homo Sapiens
aatctggtttatttttgtt

SEQ ID NO: 4403 - DNA, 19 bp, Homo Sapiens
ttccacaagttaaataaat

SEQ ID NO: 4404 - DNA, 19 bp, Homo Sapiens
cacaagttaaataaatcat

SEQ ID NO: 4405 - DNA, 19 bp, Homo Sapiens
acaagttaaataaatcata

SEQ ID NO: 4406 - DNA, 19 bp, Homo Sapiens
caagttaaataaatcataa

SEQ ID NO: 4407 - DNA, 19 bp, Homo Sapiens
aagttaaataaatcataaa

SEQ ID NO: 4408 - DNA, 19 bp, Homo Sapiens
agttaaataaatcataaaa

SEQ ID NO: 4409 - DNA, 19 bp, Homo Sapiens
gttaaataaatcataaaac

SEQ ID NO: 4410 - DNA, 19 bp, Homo Sapiens
ttaaataaatcataaaact

SEQ ID NO: 4411 - DNA, 19 bp, Homo Sapiens
taaataaatcataaaactt

SEQ ID NO: 4412 - DNA, 19 bp, Homo Sapiens
aaataaatcataaaacttg

SEQ ID NO: 4413 - DNA, 19 bp, Homo Sapiens
aataaatcataaaacttga

SEQ ID NO: 4414 - DNA, 20 bp, Homo Sapiens
gaagctgacagcattcgggc

SEQ ID NO: 4415 - DNA, 20 bp, Homo Sapiens
aagctgacagcattcgggcc

SEQ ID NO: 4416 - DNA, 20 bp, Homo Sapiens
agctgacagcattcgggccg

SEQ ID NO: 4417 - DNA, 20 bp, Homo Sapiens
gctgacagcattcgggccga

SEQ ID NO: 4418 - DNA, 20 bp, Homo Sapiens
ctgacagcattcgggccgag

SEQ ID NO: 4419 - DNA, 20 bp, Homo Sapiens
tgacagcattcgggccgaga

SEQ ID NO: 4420 - DNA, 20 bp, Homo Sapiens
gacagcattcgggccgagat

SEQ ID NO: 4421 - DNA, 20 bp, Homo Sapiens
acagcattcgggccgagatg

SEQ ID NO: 4422 - DNA, 20 bp, Homo Sapiens
cagcattcgggccgagatgt

SEQ ID NO: 4423 - DNA, 20 bp, Homo Sapiens
agcattcgggccgagatgtc

SEQ ID NO: 4424 - DNA, 20 bp, Homo Sapiens
gcattcgggccgagatgtct

SEQ ID NO: 4425 - DNA, 20 bp, Homo Sapiens
cattcgggccgagatgtctc

SEQ ID NO: 4426 - DNA, 20 bp, Homo Sapiens
attcgggccgagatgtctcg

SEQ ID NO: 4427 - DNA, 20 bp, Homo Sapiens
ttcgggccgagatgtctcgc

SEQ ID NO: 4428 - DNA, 20 bp, Homo Sapiens
tcgggccgagatgtctcgct

SEQ ID NO: 4429 - DNA, 20 bp, Homo Sapiens
cgggccgagatgtctcgctc

SEQ ID NO: 4430 - DNA, 20 bp, Homo Sapiens
gggccgagatgtctcgctcc

SEQ ID NO: 4431 - DNA, 20 bp, Homo Sapiens
ggccgagatgtctcgctccg

SEQ ID NO: 4432 - DNA, 20 bp, Homo Sapiens
gccgagatgtctcgctccgt

SEQ ID NO: 4433 - DNA, 20 bp, Homo Sapiens
ccgagatgtctcgctccgtg

SEQ ID NO: 4434 - DNA, 20 bp, Homo Sapiens
cgagatgtctcgctccgtgg

SEQ ID NO: 4435 - DNA, 20 bp, Homo Sapiens
gagatgtctcgctccgtggc

SEQ ID NO: 4436 - DNA, 20 bp, Homo Sapiens
agatgtctcgctccgtggcc

SEQ ID NO: 4437 - DNA, 20 bp, Homo Sapiens
gatgtctcgctccgtggcct

SEQ ID NO: 4438 - DNA, 20 bp, Homo Sapiens
atgtctcgctccgtggcctt

SEQ ID NO: 4439 - DNA, 20 bp, Homo Sapiens
tgtctcgctccgtggcctta

SEQ ID NO: 4440 - DNA, 20 bp, Homo Sapiens
gtctcgctccgtggccttag

SEQ ID NO: 4441 - DNA, 20 bp, Homo Sapiens
tctcgctccgtggccttagc

SEQ ID NO: 4442 - DNA, 20 bp, Homo Sapiens
ctcgctccgtggccttagct

SEQ ID NO: 4443 - DNA, 20 bp, Homo Sapiens
tcgctccgtggccttagctg

SEQ ID NO: 4444 - DNA, 20 bp, Homo Sapiens
cgctccgtggccttagctgt

SEQ ID NO: 4445 - DNA, 20 bp, Homo Sapiens
gctccgtggccttagctgtg

SEQ ID NO: 4446 - DNA, 20 bp, Homo Sapiens
ctccgtggccttagctgtgc

SEQ ID NO: 4447 - DNA, 20 bp, Homo Sapiens
tccgtggccttagctgtgct

SEQ ID NO: 4448 - DNA, 20 bp, Homo Sapiens
ccgtggccttagctgtgctc

SEQ ID NO: 4449 - DNA, 20 bp, Homo Sapiens
cgtggccttagctgtgctcg

SEQ ID NO: 4450 - DNA, 20 bp, Homo Sapiens
gtggccttagctgtgctcgc

SEQ ID NO: 4451 - DNA, 20 bp, Homo Sapiens
tggccttagctgtgctcgcg

SEQ ID NO: 4452 - DNA, 20 bp, Homo Sapiens
ggccttagctgtgctcgcgc

SEQ ID NO: 4453 - DNA, 20 bp, Homo Sapiens
gccttagctgtgctcgcgct

SEQ ID NO: 4454 - DNA, 20 bp, Homo Sapiens
ccttagctgtgctcgcgcta

SEQ ID NO: 4455 - DNA, 20 bp, Homo Sapiens
cttagctgtgctcgcgctac

SEQ ID NO: 4456 - DNA, 20 bp, Homo Sapiens
tagctgtgctcgcgctactc

SEQ ID NO: 4457 - DNA, 20 bp, Homo Sapiens
agctgtgctcgcgctactct

SEQ ID NO: 4458 - DNA, 20 bp, Homo Sapiens
gctgtgctcgcgctactctc

SEQ ID NO: 4459 - DNA, 20 bp, Homo Sapiens
ctgtgctcgcgctactctct

SEQ ID NO: 4460 - DNA, 20 bp, Homo Sapiens
tgtgctcgcgctactctctc

SEQ ID NO: 4461 - DNA, 20 bp, Homo Sapiens
gtgctcgcgctactctctct

SEQ ID NO: 4462 - DNA, 20 bp, Homo Sapiens
ctctctttctggcctggagg

SEQ ID NO: 4463 - DNA, 20 bp, Homo Sapiens
tctctttctggcctggaggc

SEQ ID NO: 4464 - DNA, 20 bp, Homo Sapiens
ctctttctggcctggaggct

SEQ ID NO: 4465 - DNA, 20 bp, Homo Sapiens
ttctggcctggaggctatcc

SEQ ID NO: 4466 - DNA, 20 bp, Homo Sapiens
tctggcctggaggctatcca

SEQ ID NO: 4467 - DNA, 20 bp, Homo Sapiens
ctggcctggaggctatccag

SEQ ID NO: 4468 - DNA, 20 bp, Homo Sapiens
tggcctggaggctatccagc

SEQ ID NO: 4469 - DNA, 20 bp, Homo Sapiens
ggcctggaggctatccagcg

SEQ ID NO: 4470 - DNA, 20 bp, Homo Sapiens
gcctggaggctatccagcgt

SEQ ID NO: 4471 - DNA, 20 bp, Homo Sapiens
cctggaggctatccagcgta

SEQ ID NO: 4472 - DNA, 20 bp, Homo Sapiens
ctggaggctatccagcgtac

SEQ ID NO: 4473 - DNA, 20 bp, Homo Sapiens
ggaggctatccagcgtactc

SEQ ID NO: 4474 - DNA, 20 bp, Homo Sapiens
gaggctatccagcgtactcc

SEQ ID NO: 4475 - DNA, 20 bp, Homo Sapiens
gtatgcctgccgtgtgaacc

SEQ ID NO: 4476 - DNA, 20 bp, Homo Sapiens
tgcctgccgtgtgaaccatg

SEQ ID NO: 4477 - DNA, 20 bp, Homo Sapiens
gcctgccgtgtgaaccatgt

SEQ ID NO: 4478 - DNA, 20 bp, Homo Sapiens
cctgccgtgtgaaccatgtg

SEQ ID NO: 4479 - DNA, 20 bp, Homo Sapiens
cttgctttttaatattgata

SEQ ID NO: 4480 - DNA, 20 bp, Homo Sapiens
ttgctttttaatattgatat

SEQ ID NO: 4481 - DNA, 20 bp, Homo Sapiens
tgctttttaatattgatatg

SEQ ID NO: 4482 - DNA, 20 bp, Homo Sapiens
ctttttaatattgatatgct

SEQ ID NO: 4483 - DNA, 20 bp, Homo Sapiens
tttttaatattgatatgctt

SEQ ID NO: 4484 - DNA, 20 bp, Homo Sapiens
ttttaatattgatatgctta

SEQ ID NO: 4485 - DNA, 20 bp, Homo Sapiens
tttaatattgatatgcttat

SEQ ID NO: 4486 - DNA, 20 bp, Homo Sapiens
ttaatattgatatgcttata

SEQ ID NO: 4487 - DNA, 20 bp, Homo Sapiens
taatattgatatgcttatac

SEQ ID NO: 4488 - DNA, 20 bp, Homo Sapiens
aatattgatatgcttataca

SEQ ID NO: 4489 - DNA, 20 bp, Homo Sapiens
aaaatgtagggttataataa

SEQ ID NO: 4490 - DNA, 20 bp, Homo Sapiens
aaatgtagggttataataat

SEQ ID NO: 4491 - DNA, 20 bp, Homo Sapiens
tagggttataataatgttaa

SEQ ID NO: 4492 - DNA, 20 bp, Homo Sapiens
ggttataataatgttaacat

SEQ ID NO: 4493 - DNA, 20 bp, Homo Sapiens
gttataataatgttaacatg

SEQ ID NO: 4494 - DNA, 20 bp, Homo Sapiens
ttataataatgttaacatgg

SEQ ID NO: 4495 - DNA, 20 bp, Homo Sapiens
tataataatgttaacatgga

SEQ ID NO: 4496 - DNA, 20 bp, Homo Sapiens
acatgatcttctttataatt

SEQ ID NO: 4497 - DNA, 20 bp, Homo Sapiens
atgatcttctttataattct

SEQ ID NO: 4498 - DNA, 20 bp, Homo Sapiens
tgatcttctttataattcta

SEQ ID NO: 4499 - DNA, 20 bp, Homo Sapiens
atcttctttataattctact

SEQ ID NO: 4500 - DNA, 20 bp, Homo Sapiens
tcttctttataattctactt

SEQ ID NO: 4501 - DNA, 20 bp, Homo Sapiens
cttctttataattctacttt

SEQ ID NO: 4502 - DNA, 20 bp, Homo Sapiens
ttctttataattctactttg

SEQ ID NO: 4503 - DNA, 20 bp, Homo Sapiens
tctttataattctactttga

SEQ ID NO: 4504 - DNA, 20 bp, Homo Sapiens
tttataattctactttgagt

SEQ ID NO: 4505 - DNA, 20 bp, Homo Sapiens
ctgagcaggttgctccacag

SEQ ID NO: 4506 - DNA, 20 bp, Homo Sapiens
tgagcaggttgctccacagg

SEQ ID NO: 4507 - DNA, 20 bp, Homo Sapiens
gagcaggttgctccacaggt

SEQ ID NO: 4508 - DNA, 20 bp, Homo Sapiens
gcaggttgctccacaggtag

SEQ ID NO: 4509 - DNA, 20 bp, Homo Sapiens
caggttgctccacaggtagc

SEQ ID NO: 4510 - DNA, 20 bp, Homo Sapiens
ggttgctccacaggtagctc

SEQ ID NO: 4511 - DNA, 20 bp, Homo Sapiens
gctccacaggtagctctagg

SEQ ID NO: 4512 - DNA, 20 bp, Homo Sapiens
ccacaggtagctctaggagg

SEQ ID NO: 4513 - DNA, 20 bp, Homo Sapiens
cacaggtagctctaggaggg

SEQ ID NO: 4514 - DNA, 20 bp, Homo Sapiens
acaggtagctctaggagggc

SEQ ID NO: 4515 - DNA, 20 bp, Homo Sapiens
caggtagctctaggagggct

SEQ ID NO: 4516 - DNA, 20 bp, Homo Sapiens
aggtagctctaggagggctg

SEQ ID NO: 4517 - DNA, 20 bp, Homo Sapiens
ggtagctctaggagggctgg

SEQ ID NO: 4518 - DNA, 20 bp, Homo Sapiens
gtagctctaggagggctggc

SEQ ID NO: 4519 - DNA, 20 bp, Homo Sapiens
tagctctaggagggctggca

SEQ ID NO: 4520 - DNA, 20 bp, Homo Sapiens
agctctaggagggctggcaa

SEQ ID NO: 4521 - DNA, 20 bp, Homo Sapiens
gctctaggagggctggcaac

SEQ ID NO: 4522 - DNA, 20 bp, Homo Sapiens
ctctaggagggctggcaact

SEQ ID NO: 4523 - DNA, 20 bp, Homo Sapiens
ggagggctggcaacttagag

SEQ ID NO: 4524 - DNA, 20 bp, Homo Sapiens
gagggctggcaacttagagg

SEQ ID NO: 4525 - DNA, 20 bp, Homo Sapiens
gggctggcaacttagaggtg

SEQ ID NO: 4526 - DNA, 20 bp, Homo Sapiens
ggctggcaacttagaggtgg

SEQ ID NO: 4527 - DNA, 20 bp, Homo Sapiens
gctggcaacttagaggtggg

SEQ ID NO: 4528 - DNA, 20 bp, Homo Sapiens
ctggcaacttagaggtgggg

SEQ ID NO: 4529 - DNA, 20 bp, Homo Sapiens
ggcaacttagaggtggggag

SEQ ID NO: 4530 - DNA, 20 bp, Homo Sapiens
gcaacttagaggtggggagc

SEQ ID NO: 4531 - DNA, 20 bp, Homo Sapiens
cttagaggtggggagcagag

SEQ ID NO: 4532 - DNA, 20 bp, Homo Sapiens
ataagttaacttccaattta

SEQ ID NO: 4533 - DNA, 20 bp, Homo Sapiens
gggaaaatttagaaatataa

SEQ ID NO: 4534 - DNA, 20 bp, Homo Sapiens
ggaaaatttagaaatataat

SEQ ID NO: 4535 - DNA, 20 bp, Homo Sapiens
gaaaatttagaaatataatt

SEQ ID NO: 4536 - DNA, 20 bp, Homo Sapiens
aaaatttagaaatataattg

SEQ ID NO: 4537 - DNA, 20 bp, Homo Sapiens
aaatttagaaatataattga

SEQ ID NO: 4538 - DNA, 20 bp, Homo Sapiens
aatttagaaatataattgac

SEQ ID NO: 4539 - DNA, 20 bp, Homo Sapiens
atttagaaatataattgaca

SEQ ID NO: 4540 - DNA, 20 bp, Homo Sapiens
tttagaaatataattgacag

SEQ ID NO: 4541 - DNA, 20 bp, Homo Sapiens
aaatataattgacaggatta

SEQ ID NO: 4542 - DNA, 20 bp, Homo Sapiens
aatataattgacaggattat

SEQ ID NO: 4543 - DNA, 20 bp, Homo Sapiens
atataattgacaggattatt

SEQ ID NO: 4544 - DNA, 20 bp, Homo Sapiens
gattattggaaatttgttat

SEQ ID NO: 4545 - DNA, 20 bp, Homo Sapiens
attattggaaatttgttata

SEQ ID NO: 4546 - DNA, 20 bp, Homo Sapiens
ttattggaaatttgttataa

SEQ ID NO: 4547 - DNA, 20 bp, Homo Sapiens
tattggaaatttgttataat

SEQ ID NO: 4548 - DNA, 20 bp, Homo Sapiens
attggaaatttgttataatg

SEQ ID NO: 4549 - DNA, 20 bp, Homo Sapiens
ttggaaatttgttataatga

SEQ ID NO: 4550 - DNA, 20 bp, Homo Sapiens
tggaaatttgttataatgaa

SEQ ID NO: 4551 - DNA, 20 bp, Homo Sapiens
ggaaatttgttataatgaat

SEQ ID NO: 4552 - DNA, 20 bp, Homo Sapiens
gaaatttgttataatgaatg

SEQ ID NO: 4553 - DNA, 20 bp, Homo Sapiens
aaatttgttataatgaatga

SEQ ID NO: 4554 - DNA, 20 bp, Homo Sapiens
aatttgttataatgaatgaa

SEQ ID NO: 4555 - DNA, 20 bp, Homo Sapiens
atttgttataatgaatgaaa

SEQ ID NO: 4556 - DNA, 20 bp, Homo Sapiens
tttgttataatgaatgaaac

SEQ ID NO: 4557 - DNA, 20 bp, Homo Sapiens
ttgttataatgaatgaaaca

SEQ ID NO: 4558 - DNA, 20 bp, Homo Sapiens
tgttataatgaatgaaacat

SEQ ID NO: 4559 - DNA, 20 bp, Homo Sapiens
gttataatgaatgaaacatt

SEQ ID NO: 4560 - DNA, 20 bp, Homo Sapiens
ttataatgaatgaaacattt

SEQ ID NO: 4561 - DNA, 20 bp, Homo Sapiens
tataatgaatgaaacatttt

SEQ ID NO: 4562 - DNA, 20 bp, Homo Sapiens
ataatgaatgaaacattttg

SEQ ID NO: 4563 - DNA, 20 bp, Homo Sapiens
taatgaatgaaacattttgt

SEQ ID NO: 4564 - DNA, 20 bp, Homo Sapiens
aatgaaacattttgtcatat

SEQ ID NO: 4565 - DNA, 20 bp, Homo Sapiens
atgaaacattttgtcatata

SEQ ID NO: 4566 - DNA, 20 bp, Homo Sapiens
tgaaacattttgtcatataa

SEQ ID NO: 4567 - DNA, 20 bp, Homo Sapiens
aaacattttgtcatataaga

SEQ ID NO: 4568 - DNA, 20 bp, Homo Sapiens
aacattttgtcatataagat

SEQ ID NO: 4569 - DNA, 20 bp, Homo Sapiens
acattttgtcatataagatt

SEQ ID NO: 4570 - DNA, 20 bp, Homo Sapiens
attttgtcatataagattca

SEQ ID NO: 4571 - DNA, 20 bp, Homo Sapiens
ttttgtcatataagattcat

SEQ ID NO: 4572 - DNA, 20 bp, Homo Sapiens
tttgtcatataagattcata

SEQ ID NO: 4573 - DNA, 20 bp, Homo Sapiens
ttgtcatataagattcatat

SEQ ID NO: 4574 - DNA, 20 bp, Homo Sapiens
tgtcatataagattcatatt

SEQ ID NO: 4575 - DNA, 20 bp, Homo Sapiens
gtcatataagattcatattt

SEQ ID NO: 4576 - DNA, 20 bp, Homo Sapiens
tcatataagattcatattta

SEQ ID NO: 4577 - DNA, 20 bp, Homo Sapiens
catataagattcatatttac

SEQ ID NO: 4578 - DNA, 20 bp, Homo Sapiens
atataagattcatatttact

SEQ ID NO: 4579 - DNA, 20 bp, Homo Sapiens
tataagattcatatttactt

SEQ ID NO: 4580 - DNA, 20 bp, Homo Sapiens
ataagattcatatttacttc

SEQ ID NO: 4581 - DNA, 20 bp, Homo Sapiens
taagattcatatttacttct

SEQ ID NO: 4582 - DNA, 20 bp, Homo Sapiens
aagattcatatttacttctt

SEQ ID NO: 4583 - DNA, 20 bp, Homo Sapiens
agattcatatttacttctta

SEQ ID NO: 4584 - DNA, 20 bp, Homo Sapiens
gattcatatttacttcttat

SEQ ID NO: 4585 - DNA, 20 bp, Homo Sapiens
attcatatttacttcttata

SEQ ID NO: 4586 - DNA, 20 bp, Homo Sapiens
ttcatatttacttcttatac

SEQ ID NO: 4587 - DNA, 20 bp, Homo Sapiens
tcatatttacttcttataca

SEQ ID NO: 4588 - DNA, 20 bp, Homo Sapiens
catatttacttcttatacat

SEQ ID NO: 4589 - DNA, 20 bp, Homo Sapiens
atatttacttcttatacatt

SEQ ID NO: 4590 - DNA, 20 bp, Homo Sapiens
tatttacttcttatacattt

SEQ ID NO: 4591 - DNA, 20 bp, Homo Sapiens
atttacttcttatacatttg

SEQ ID NO: 4592 - DNA, 20 bp, Homo Sapiens
tttacttcttatacatttga

SEQ ID NO: 4593 - DNA, 20 bp, Homo Sapiens
ttacttcttatacatttgat

SEQ ID NO: 4594 - DNA, 20 bp, Homo Sapiens
tacttcttatacatttgata

SEQ ID NO: 4595 - DNA, 20 bp, Homo Sapiens
acttcttatacatttgataa

SEQ ID NO: 4596 - DNA, 20 bp, Homo Sapiens
cttcttatacatttgataaa

SEQ ID NO: 4597 - DNA, 20 bp, Homo Sapiens
ttcttatacatttgataaag

SEQ ID NO: 4598 - DNA, 20 bp, Homo Sapiens
tcttatacatttgataaagt

SEQ ID NO: 4599 - DNA, 20 bp, Homo Sapiens
cttatacatttgataaagta

SEQ ID NO: 4600 - DNA, 20 bp, Homo Sapiens
ttatacatttgataaagtaa

SEQ ID NO: 4601 - DNA, 20 bp, Homo Sapiens
tatacatttgataaagtaag

SEQ ID NO: 4602 - DNA, 20 bp, Homo Sapiens
ttaatctggtttatttttgt

SEQ ID NO: 4603 - DNA, 20 bp, Homo Sapiens
taatctggtttatttttgtt

SEQ ID NO: 4604 - DNA, 20 bp, Homo Sapiens
cacaagttaaataaatcata

SEQ ID NO: 4605 - DNA, 20 bp, Homo Sapiens
acaagttaaataaatcataa

SEQ ID NO: 4606 - DNA, 20 bp, Homo Sapiens
caagttaaataaatcataaa

SEQ ID NO: 4607 - DNA, 20 bp, Homo Sapiens
aagttaaataaatcataaaa

SEQ ID NO: 4608 - DNA, 20 bp, Homo Sapiens
agttaaataaatcataaaac

SEQ ID NO: 4609 - DNA, 20 bp, Homo Sapiens
gttaaataaatcataaaact

SEQ ID NO: 4610 - DNA, 20 bp, Homo Sapiens
ttaaataaatcataaaactt

SEQ ID NO: 4611 - DNA, 20 bp, Homo Sapiens
taaataaatcataaaacttg

SEQ ID NO: 4612 - DNA, 20 bp, Homo Sapiens
aaataaatcataaaacttga

SEQ ID NO: 4613 - DNA, 21 bp, Homo Sapiens
gaagctgacagcattcgggcc

SEQ ID NO: 4614 - DNA, 21 bp, Homo Sapiens
aagctgacagcattcgggccg

SEQ ID NO: 4615 - DNA, 21 bp, Homo Sapiens
agctgacagcattcgggccga

SEQ ID NO: 4616 - DNA, 21 bp, Homo Sapiens
gctgacagcattcgggccgag

SEQ ID NO: 4617 - DNA, 21 bp, Homo Sapiens
ctgacagcattcgggccgaga

SEQ ID NO: 4618 - DNA, 21 bp, Homo Sapiens
gacagcattcgggccgagatg

SEQ ID NO: 4619 - DNA, 21 bp, Homo Sapiens
cagcattcgggccgagatgtc

SEQ ID NO: 4620 - DNA, 21 bp, Homo Sapiens
gcattcgggccgagatgtctc

SEQ ID NO: 4621 - DNA, 21 bp, Homo Sapiens
cattcgggccgagatgtctcg

SEQ ID NO: 4622 - DNA, 21 bp, Homo Sapiens
attcgggccgagatgtctcgc

SEQ ID NO: 4623 - DNA, 21 bp, Homo Sapiens
ttcgggccgagatgtctcgct

SEQ ID NO: 4624 - DNA, 21 bp, Homo Sapiens
tcgggccgagatgtctcgctc

SEQ ID NO: 4625 - DNA, 21 bp, Homo Sapiens
cgggccgagatgtctcgctcc

SEQ ID NO: 4626 - DNA, 21 bp, Homo Sapiens
gggccgagatgtctcgctccg

SEQ ID NO: 4627 - DNA, 21 bp, Homo Sapiens
ggccgagatgtctcgctccgt

SEQ ID NO: 4628 - DNA, 21 bp, Homo Sapiens
gccgagatgtctcgctccgtg

SEQ ID NO: 4629 - DNA, 21 bp, Homo Sapiens
ccgagatgtctcgctccgtgg

SEQ ID NO: 4630 - DNA, 21 bp, Homo Sapiens
cgagatgtctcgctccgtggc

SEQ ID NO: 4631 - DNA, 21 bp, Homo Sapiens
gagatgtctcgctccgtggcc

SEQ ID NO: 4632 - DNA, 21 bp, Homo Sapiens
agatgtctcgctccgtggcct

SEQ ID NO: 4633 - DNA, 21 bp, Homo Sapiens
gatgtctcgctccgtggcctt

SEQ ID NO: 4634 - DNA, 21 bp, Homo Sapiens
tgtctcgctccgtggccttag

SEQ ID NO: 4635 - DNA, 21 bp, Homo Sapiens
gtctcgctccgtggccttagc

SEQ ID NO: 4636 - DNA, 21 bp, Homo Sapiens
tctcgctccgtggccttagct

SEQ ID NO: 4637 - DNA, 21 bp, Homo Sapiens
ctcgctccgtggccttagctg

SEQ ID NO: 4638 - DNA, 21 bp, Homo Sapiens
tcgctccgtggccttagctgt

SEQ ID NO: 4639 - DNA, 21 bp, Homo Sapiens
cgctccgtggccttagctgtg

SEQ ID NO: 4640 - DNA, 21 bp, Homo Sapiens
gctccgtggccttagctgtgc

SEQ ID NO: 4641 - DNA, 21 bp, Homo Sapiens
ctccgtggccttagctgtgct

SEQ ID NO: 4642 - DNA, 21 bp, Homo Sapiens
tccgtggccttagctgtgctc

SEQ ID NO: 4643 - DNA, 21 bp, Homo Sapiens
ccgtggccttagctgtgctcg

SEQ ID NO: 4644 - DNA, 21 bp, Homo Sapiens
cgtggccttagctgtgctcgc

SEQ ID NO: 4645 - DNA, 21 bp, Homo Sapiens
gtggccttagctgtgctcgcg

SEQ ID NO: 4646 - DNA, 21 bp, Homo Sapiens
tggccttagctgtgctcgcgc

SEQ ID NO: 4647 - DNA, 21 bp, Homo Sapiens
ggccttagctgtgctcgcgct

SEQ ID NO: 4648 - DNA, 21 bp, Homo Sapiens
gccttagctgtgctcgcgcta

SEQ ID NO: 4649 - DNA, 21 bp, Homo Sapiens
ccttagctgtgctcgcgctac

SEQ ID NO: 4650 - DNA, 21 bp, Homo Sapiens
agctgtgctcgcgctactctc

SEQ ID NO: 4651 - DNA, 21 bp, Homo Sapiens
gctgtgctcgcgctactctct

SEQ ID NO: 4652 - DNA, 21 bp, Homo Sapiens
ctgtgctcgcgctactctctc

SEQ ID NO: 4653 - DNA, 21 bp, Homo Sapiens
ctctctttctggcctggaggc

SEQ ID NO: 4654 - DNA, 21 bp, Homo Sapiens
tctggcctggaggctatccag

SEQ ID NO: 4655 - DNA, 21 bp, Homo Sapiens
ctggcctggaggctatccagc

SEQ ID NO: 4656 - DNA, 21 bp, Homo Sapiens
tggcctggaggctatccagcg

SEQ ID NO: 4657 - DNA, 21 bp, Homo Sapiens
ggcctggaggctatccagcgt

SEQ ID NO: 4658 - DNA, 21 bp, Homo Sapiens
gcctggaggctatccagcgta

SEQ ID NO: 4659 - DNA, 21 bp, Homo Sapiens
cctggaggctatccagcgtac

SEQ ID NO: 4660 - DNA, 21 bp, Homo Sapiens
ggaggctatccagcgtactcc

SEQ ID NO: 4661 - DNA, 21 bp, Homo Sapiens
gcctgccgtgtgaaccatgtg

SEQ ID NO: 4662 - DNA, 21 bp, Homo Sapiens
ttgcttgctttttaatattga

SEQ ID NO: 4663 - DNA, 21 bp, Homo Sapiens
tgcttgctttttaatattgat

SEQ ID NO: 4664 - DNA, 21 bp, Homo Sapiens
gcttgctttttaatattgata

SEQ ID NO: 4665 - DNA, 21 bp, Homo Sapiens
cttgctttttaatattgatat

SEQ ID NO: 4666 - DNA, 21 bp, Homo Sapiens
ttgctttttaatattgatatg

SEQ ID NO: 4667 - DNA, 21 bp, Homo Sapiens
tgctttttaatattgatatgc

SEQ ID NO: 4668 - DNA, 21 bp, Homo Sapiens
gctttttaatattgatatgct

SEQ ID NO: 4669 - DNA, 21 bp, Homo Sapiens
ctttttaatattgatatgctt

SEQ ID NO: 4670 - DNA, 21 bp, Homo Sapiens
tttttaatattgatatgctta

SEQ ID NO: 4671 - DNA, 21 bp, Homo Sapiens
ttttaatattgatatgcttat

SEQ ID NO: 4672 - DNA, 21 bp, Homo Sapiens
tttaatattgatatgcttata

SEQ ID NO: 4673 - DNA, 21 bp, Homo Sapiens
ttaatattgatatgcttatac

SEQ ID NO: 4674 - DNA, 21 bp, Homo Sapiens
taatattgatatgcttataca

SEQ ID NO: 4675 - DNA, 21 bp, Homo Sapiens
aatattgatatgcttatacac

SEQ ID NO: 4676 - DNA, 21 bp, Homo Sapiens
atattgatatgcttatacact

SEQ ID NO: 4677 - DNA, 21 bp, Homo Sapiens
tattgatatgcttatacactt

SEQ ID NO: 4678 - DNA, 21 bp, Homo Sapiens
attgatatgcttatacactta

SEQ ID NO: 4679 - DNA, 21 bp, Homo Sapiens
acaaaatgtagggttataata

SEQ ID NO: 4680 - DNA, 21 bp, Homo Sapiens
caaaatgtagggttataataa

SEQ ID NO: 4681 - DNA, 21 bp, Homo Sapiens
aaaatgtagggttataataat

SEQ ID NO: 4682 - DNA, 21 bp, Homo Sapiens
aaatgtagggttataataatg

SEQ ID NO: 4683 - DNA, 21 bp, Homo Sapiens
aatgtagggttataataatgt

SEQ ID NO: 4684 - DNA, 21 bp, Homo Sapiens
atgtagggttataataatgtt

SEQ ID NO: 4685 - DNA, 21 bp, Homo Sapiens
tgtagggttataataatgtta

SEQ ID NO: 4686 - DNA, 21 bp, Homo Sapiens
gtagggttataataatgttaa

SEQ ID NO: 4687 - DNA, 21 bp, Homo Sapiens
tagggttataataatgttaac

SEQ ID NO: 4688 - DNA, 21 bp, Homo Sapiens
agggttataataatgttaaca

SEQ ID NO: 4689 - DNA, 21 bp, Homo Sapiens
gggttataataatgttaacat

SEQ ID NO: 4690 - DNA, 21 bp, Homo Sapiens
ggttataataatgttaacatg

SEQ ID NO: 4691 - DNA, 21 bp, Homo Sapiens
gttataataatgttaacatgg

SEQ ID NO: 4692 - DNA, 21 bp, Homo Sapiens
ttataataatgttaacatgga

SEQ ID NO: 4693 - DNA, 21 bp, Homo Sapiens
tataataatgttaacatggac

SEQ ID NO: 4694 - DNA, 21 bp, Homo Sapiens
ataataatgttaacatggaca

SEQ ID NO: 4695 - DNA, 21 bp, Homo Sapiens
taataatgttaacatggacat

SEQ ID NO: 4696 - DNA, 21 bp, Homo Sapiens
gacatgatcttctttataatt

SEQ ID NO: 4697 - DNA, 21 bp, Homo Sapiens
acatgatcttctttataattc

SEQ ID NO: 4698 - DNA, 21 bp, Homo Sapiens
catgatcttctttataattct

SEQ ID NO: 4699 - DNA, 21 bp, Homo Sapiens
atgatcttctttataattcta

SEQ ID NO: 4700 - DNA, 21 bp, Homo Sapiens
tgatcttctttataattctac

SEQ ID NO: 4701 - DNA, 21 bp, Homo Sapiens
gatcttctttataattctact

SEQ ID NO: 4702 - DNA, 21 bp, Homo Sapiens
atcttctttataattctactt

SEQ ID NO: 4703 - DNA, 21 bp, Homo Sapiens
tcttctttataattctacttt

SEQ ID NO: 4704 - DNA, 21 bp, Homo Sapiens
cttctttataattctactttg

SEQ ID NO: 4705 - DNA, 21 bp, Homo Sapiens
ttctttataattctactttga

SEQ ID NO: 4706 - DNA, 21 bp, Homo Sapiens
tctttataattctactttgag

SEQ ID NO: 4707 - DNA, 21 bp, Homo Sapiens
ctttataattctactttgagt

SEQ ID NO: 4708 - DNA, 21 bp, Homo Sapiens
tttataattctactttgagtg

SEQ ID NO: 4709 - DNA, 21 bp, Homo Sapiens
ctgagcaggttgctccacagg

SEQ ID NO: 4710 - DNA, 21 bp, Homo Sapiens
gcaggttgctccacaggtagc

SEQ ID NO: 4711 - DNA, 21 bp, Homo Sapiens
ccacaggtagctctaggaggg

SEQ ID NO: 4712 - DNA, 21 bp, Homo Sapiens
cacaggtagctctaggagggc

SEQ ID NO: 4713 - DNA, 21 bp, Homo Sapiens
caggtagctctaggagggctg

SEQ ID NO: 4714 - DNA, 21 bp, Homo Sapiens
aggtagctctaggagggctgg

SEQ ID NO: 4715 - DNA, 21 bp, Homo Sapiens
ggtagctctaggagggctggc

SEQ ID NO: 4716 - DNA, 21 bp, Homo Sapiens
gtagctctaggagggctggca

SEQ ID NO: 4717 - DNA, 21 bp, Homo Sapiens
agctctaggagggctggcaac

SEQ ID NO: 4718 - DNA, 21 bp, Homo Sapiens
gctctaggagggctggcaact

SEQ ID NO: 4719 - DNA, 21 bp, Homo Sapiens
ggagggctggcaacttagagg

SEQ ID NO: 4720 - DNA, 21 bp, Homo Sapiens
gggctggcaacttagaggtgg

SEQ ID NO: 4721 - DNA, 21 bp, Homo Sapiens
ggctggcaacttagaggtggg

SEQ ID NO: 4722 - DNA, 21 bp, Homo Sapiens
gctggcaacttagaggtgggg

SEQ ID NO: 4723 - DNA, 21 bp, Homo Sapiens
ggcaacttagaggtggggagc

SEQ ID NO: 4724 - DNA, 21 bp, Homo Sapiens
aaagcttgttaagatagttaa

SEQ ID NO: 4725 - DNA, 21 bp, Homo Sapiens
cataagttaacttccaattta

SEQ ID NO: 4726 - DNA, 21 bp, Homo Sapiens
ataagttaacttccaatttac

SEQ ID NO: 4727 - DNA, 21 bp, Homo Sapiens
taagttaacttccaatttaca

SEQ ID NO: 4728 - DNA, 21 bp, Homo Sapiens
aagttaacttccaatttacat

SEQ ID NO: 4729 - DNA, 21 bp, Homo Sapiens
agttaacttccaatttacata

SEQ ID NO: 4730 - DNA, 21 bp, Homo Sapiens
ttaacttccaatttacatact

SEQ ID NO: 4731 - DNA, 21 bp, Homo Sapiens
ggggaaaatttagaaatataa

SEQ ID NO: 4732 - DNA, 21 bp, Homo Sapiens
gggaaaatttagaaatataat

SEQ ID NO: 4733 - DNA, 21 bp, Homo Sapiens
ggaaaatttagaaatataatt

SEQ ID NO: 4734 - DNA, 21 bp, Homo Sapiens
gaaaatttagaaatataattg

SEQ ID NO: 4735 - DNA, 21 bp, Homo Sapiens
aaaatttagaaatataattga

SEQ ID NO: 4736 - DNA, 21 bp, Homo Sapiens
aaatttagaaatataattgac

SEQ ID NO: 4737 - DNA, 21 bp, Homo Sapiens
aatttagaaatataattgaca

SEQ ID NO: 4738 - DNA, 21 bp, Homo Sapiens
atttagaaatataattgacag

SEQ ID NO: 4739 - DNA, 21 bp, Homo Sapiens
tttagaaatataattgacagg

SEQ ID NO: 4740 - DNA, 21 bp, Homo Sapiens
ttagaaatataattgacagga

SEQ ID NO: 4741 - DNA, 21 bp, Homo Sapiens
tagaaatataattgacaggat

SEQ ID NO: 4742 - DNA, 21 bp, Homo Sapiens
agaaatataattgacaggatt

SEQ ID NO: 4743 - DNA, 21 bp, Homo Sapiens
gaaatataattgacaggatta

SEQ ID NO: 4744 - DNA, 21 bp, Homo Sapiens
aaatataattgacaggattat

SEQ ID NO: 4745 - DNA, 21 bp, Homo Sapiens
aatataattgacaggattatt

SEQ ID NO: 4746 - DNA, 21 bp, Homo Sapiens
atataattgacaggattattg

SEQ ID NO: 4747 - DNA, 21 bp, Homo Sapiens
aggattattggaaatttgtta

SEQ ID NO: 4748 - DNA, 21 bp, Homo Sapiens
ggattattggaaatttgttat

SEQ ID NO: 4749 - DNA, 21 bp, Homo Sapiens
gattattggaaatttgttata

SEQ ID NO: 4750 - DNA, 21 bp, Homo Sapiens
attattggaaatttgttataa

SEQ ID NO: 4751 - DNA, 21 bp, Homo Sapiens
ttattggaaatttgttataat

SEQ ID NO: 4752 - DNA, 21 bp, Homo Sapiens
tattggaaatttgttataatg

SEQ ID NO: 4753 - DNA, 21 bp, Homo Sapiens
attggaaatttgttataatga

SEQ ID NO: 4754 - DNA, 21 bp, Homo Sapiens
ttggaaatttgttataatgaa

SEQ ID NO: 4755 - DNA, 21 bp, Homo Sapiens
tggaaatttgttataatgaat

SEQ ID NO: 4756 - DNA, 21 bp, Homo Sapiens
ggaaatttgttataatgaatg

SEQ ID NO: 4757 - DNA, 21 bp, Homo Sapiens
gaaatttgttataatgaatga

SEQ ID NO: 4758 - DNA, 21 bp, Homo Sapiens
aaatttgttataatgaatgaa

SEQ ID NO: 4759 - DNA, 21 bp, Homo Sapiens
aatttgttataatgaatgaaa

SEQ ID NO: 4760 - DNA, 21 bp, Homo Sapiens
atttgttataatgaatgaaac

SEQ ID NO: 4761 - DNA, 21 bp, Homo Sapiens
tttgttataatgaatgaaaca

SEQ ID NO: 4762 - DNA, 21 bp, Homo Sapiens
ttgttataatgaatgaaacat

SEQ ID NO: 4763 - DNA, 21 bp, Homo Sapiens
tgttataatgaatgaaacatt

SEQ ID NO: 4764 - DNA, 21 bp, Homo Sapiens
gttataatgaatgaaacattt

SEQ ID NO: 4765 - DNA, 21 bp, Homo Sapiens
ttataatgaatgaaacatttt

SEQ ID NO: 4766 - DNA, 21 bp, Homo Sapiens
tataatgaatgaaacattttg

SEQ ID NO: 4767 - DNA, 21 bp, Homo Sapiens
ataatgaatgaaacattttgt

SEQ ID NO: 4768 - DNA, 21 bp, Homo Sapiens
taatgaatgaaacattttgtc

SEQ ID NO: 4769 - DNA, 21 bp, Homo Sapiens
aatgaatgaaacattttgtca

SEQ ID NO: 4770 - DNA, 21 bp, Homo Sapiens
atgaatgaaacattttgtcat

SEQ ID NO: 4771 - DNA, 21 bp, Homo Sapiens
tgaatgaaacattttgtcata

SEQ ID NO: 4772 - DNA, 21 bp, Homo Sapiens
gaatgaaacattttgtcatat

SEQ ID NO: 4773 - DNA, 21 bp, Homo Sapiens
aatgaaacattttgtcatata

SEQ ID NO: 4774 - DNA, 21 bp, Homo Sapiens
atgaaacattttgtcatataa

SEQ ID NO: 4775 - DNA, 21 bp, Homo Sapiens
tgaaacattttgtcatataag

SEQ ID NO: 4776 - DNA, 21 bp, Homo Sapiens
gaaacattttgtcatataaga

SEQ ID NO: 4777 - DNA, 21 bp, Homo Sapiens
aaacattttgtcatataagat

SEQ ID NO: 4778 - DNA, 21 bp, Homo Sapiens
aacattttgtcatataagatt

SEQ ID NO: 4779 - DNA, 21 bp, Homo Sapiens
acattttgtcatataagattc

SEQ ID NO: 4780 - DNA, 21 bp, Homo Sapiens
cattttgtcatataagattca

SEQ ID NO: 4781 - DNA, 21 bp, Homo Sapiens
attttgtcatataagattcat

SEQ ID NO: 4782 - DNA, 21 bp, Homo Sapiens
ttttgtcatataagattcata

SEQ ID NO: 4783 - DNA, 21 bp, Homo Sapiens
tttgtcatataagattcatat

SEQ ID NO: 4784 - DNA, 21 bp, Homo Sapiens
ttgtcatataagattcatatt

SEQ ID NO: 4785 - DNA, 21 bp, Homo Sapiens
tgtcatataagattcatattt

SEQ ID NO: 4786 - DNA, 21 bp, Homo Sapiens
gtcatataagattcatattta

SEQ ID NO: 4787 - DNA, 21 bp, Homo Sapiens
tcatataagattcatatttac

SEQ ID NO: 4788 - DNA, 21 bp, Homo Sapiens
catataagattcatatttact

SEQ ID NO: 4789 - DNA, 21 bp, Homo Sapiens
atataagattcatatttactt

SEQ ID NO: 4790 - DNA, 21 bp, Homo Sapiens
tataagattcatatttacttc

SEQ ID NO: 4791 - DNA, 21 bp, Homo Sapiens
ataagattcatatttacttct

SEQ ID NO: 4792 - DNA, 21 bp, Homo Sapiens
taagattcatatttacttctt

SEQ ID NO: 4793 - DNA, 21 bp, Homo Sapiens
aagattcatatttacttctta

SEQ ID NO: 4794 - DNA, 21 bp, Homo Sapiens
agattcatatttacttcttat

SEQ ID NO: 4795 - DNA, 21 bp, Homo Sapiens
gattcatatttacttcttata

SEQ ID NO: 4796 - DNA, 21 bp, Homo Sapiens
attcatatttacttcttatac

SEQ ID NO: 4797 - DNA, 21 bp, Homo Sapiens
ttcatatttacttcttataca

SEQ ID NO: 4798 - DNA, 21 bp, Homo Sapiens
tcatatttacttcttatacat

SEQ ID NO: 4799 - DNA, 21 bp, Homo Sapiens
catatttacttcttatacatt

SEQ ID NO: 4800 - DNA, 21 bp, Homo Sapiens
atatttacttcttatacattt

SEQ ID NO: 4801 - DNA, 21 bp, Homo Sapiens
tatttacttcttatacatttg

SEQ ID NO: 4802 - DNA, 21 bp, Homo Sapiens
atttacttcttatacatttga

SEQ ID NO: 4803 - DNA, 21 bp, Homo Sapiens
tttacttcttatacatttgat

SEQ ID NO: 4804 - DNA, 21 bp, Homo Sapiens
ttacttcttatacatttgata

SEQ ID NO: 4805 - DNA, 21 bp, Homo Sapiens
tacttcttatacatttgataa

SEQ ID NO: 4806 - DNA, 21 bp, Homo Sapiens
acttcttatacatttgataaa

SEQ ID NO: 4807 - DNA, 21 bp, Homo Sapiens
cttcttatacatttgataaag

SEQ ID NO: 4808 - DNA, 21 bp, Homo Sapiens
ttcttatacatttgataaagt

SEQ ID NO: 4809 - DNA, 21 bp, Homo Sapiens
tcttatacatttgataaagta

SEQ ID NO: 4810 - DNA, 21 bp, Homo Sapiens
cttatacatttgataaagtaa

SEQ ID NO: 4811 - DNA, 21 bp, Homo Sapiens
ttatacatttgataaagtaag

SEQ ID NO: 4812 - DNA, 21 bp, Homo Sapiens
tatacatttgataaagtaagg

SEQ ID NO: 4813 - DNA, 21 bp, Homo Sapiens
tggttaatctggtttattttt

SEQ ID NO: 4814 - DNA, 21 bp, Homo Sapiens
gttaatctggtttatttttgt

SEQ ID NO: 4815 - DNA, 21 bp, Homo Sapiens
ttaatctggtttatttttgtt

SEQ ID NO: 4816 - DNA, 21 bp, Homo Sapiens
taatctggtttatttttgttc

SEQ ID NO: 4817 - DNA, 21 bp, Homo Sapiens
tttatttttgttccacaagtt

SEQ ID NO: 4818 - DNA, 21 bp, Homo Sapiens
ttatttttgttccacaagtta

SEQ ID NO: 4819 - DNA, 21 bp, Homo Sapiens
tatttttgttccacaagttaa

SEQ ID NO: 4820 - DNA, 21 bp, Homo Sapiens
atttttgttccacaagttaaa

SEQ ID NO: 4821 - DNA, 21 bp, Homo Sapiens
tttttgttccacaagttaaat

SEQ ID NO: 4822 - DNA, 21 bp, Homo Sapiens
ttttgttccacaagttaaata

SEQ ID NO: 4823 - DNA, 21 bp, Homo Sapiens
tttgttccacaagttaaataa

SEQ ID NO: 4824 - DNA, 21 bp, Homo Sapiens
ttgttccacaagttaaataaa

SEQ ID NO: 4825 - DNA, 21 bp, Homo Sapiens
tgttccacaagttaaataaat

SEQ ID NO: 4826 - DNA, 21 bp, Homo Sapiens
ttccacaagttaaataaatca

SEQ ID NO: 4827 - DNA, 21 bp, Homo Sapiens
tccacaagttaaataaatcat

SEQ ID NO: 4828 - DNA, 21 bp, Homo Sapiens
ccacaagttaaataaatcata

SEQ ID NO: 4829 - DNA, 21 bp, Homo Sapiens
cacaagttaaataaatcataa

SEQ ID NO: 4830 - DNA, 21 bp, Homo Sapiens
acaagttaaataaatcataaa

SEQ ID NO: 4831 - DNA, 21 bp, Homo Sapiens
caagttaaataaatcataaaa

SEQ ID NO: 4832 - DNA, 21 bp, Homo Sapiens
aagttaaataaatcataaaac

SEQ ID NO: 4833 - DNA, 21 bp, Homo Sapiens
agttaaataaatcataaaact

SEQ ID NO: 4834 - DNA, 21 bp, Homo Sapiens
gttaaataaatcataaaactt

SEQ ID NO: 4835 - DNA, 21 bp, Homo Sapiens
ttaaataaatcataaaacttg

SEQ ID NO: 4836 - DNA, 21 bp, Homo Sapiens
taaataaatcataaaacttga

SEQ ID NO: 4837 - DNA, 22 bp, Homo Sapiens
gaagctgacagcattcgggccg

SEQ ID NO: 4838 - DNA, 22 bp, Homo Sapiens
agctgacagcattcgggccgag

SEQ ID NO: 4839 - DNA, 22 bp, Homo Sapiens
gctgacagcattcgggccgaga

SEQ ID NO: 4840 - DNA, 22 bp, Homo Sapiens
gcattcgggccgagatgtctcg

SEQ ID NO: 4841 - DNA, 22 bp, Homo Sapiens
cattcgggccgagatgtctcgc

SEQ ID NO: 4842 - DNA, 22 bp, Homo Sapiens
ttcgggccgagatgtctcgctc

SEQ ID NO: 4843 - DNA, 22 bp, Homo Sapiens
tcgggccgagatgtctcgctcc

SEQ ID NO: 4844 - DNA, 22 bp, Homo Sapiens
cgggccgagatgtctcgctccg

SEQ ID NO: 4845 - DNA, 22 bp, Homo Sapiens
gggccgagatgtctcgctccgt

SEQ ID NO: 4846 - DNA, 22 bp, Homo Sapiens
ggccgagatgtctcgctccgtg

SEQ ID NO: 4847 - DNA, 22 bp, Homo Sapiens
gccgagatgtctcgctccgtgg

SEQ ID NO: 4848 - DNA, 22 bp, Homo Sapiens
ccgagatgtctcgctccgtggc

SEQ ID NO: 4849 - DNA, 22 bp, Homo Sapiens
cgagatgtctcgctccgtggcc

SEQ ID NO: 4850 - DNA, 22 bp, Homo Sapiens
gagatgtctcgctccgtggcct

SEQ ID NO: 4851 - DNA, 22 bp, Homo Sapiens
tgtctcgctccgtggccttagc

SEQ ID NO: 4852 - DNA, 22 bp, Homo Sapiens
gtctcgctccgtggccttagct

SEQ ID NO: 4853 - DNA, 22 bp, Homo Sapiens
tctcgctccgtggccttagctg

SEQ ID NO: 4854 - DNA, 22 bp, Homo Sapiens
ctcgctccgtggccttagctgt

SEQ ID NO: 4855 - DNA, 22 bp, Homo Sapiens
tcgctccgtggccttagctgtg

SEQ ID NO: 4856 - DNA, 22 bp, Homo Sapiens
cgctccgtggccttagctgtgc

SEQ ID NO: 4857 - DNA, 22 bp, Homo Sapiens
gctccgtggccttagctgtgct

SEQ ID NO: 4858 - DNA, 22 bp, Homo Sapiens
ctccgtggccttagctgtgctc

SEQ ID NO: 4859 - DNA, 22 bp, Homo Sapiens
tccgtggccttagctgtgctcg

SEQ ID NO: 4860 - DNA, 22 bp, Homo Sapiens
ccgtggccttagctgtgctcgc

SEQ ID NO: 4861 - DNA, 22 bp, Homo Sapiens
cgtggccttagctgtgctcgcg

SEQ ID NO: 4862 - DNA, 22 bp, Homo Sapiens
gtggccttagctgtgctcgcgc

SEQ ID NO: 4863 - DNA, 22 bp, Homo Sapiens
tggccttagctgtgctcgcgct

SEQ ID NO: 4864 - DNA, 22 bp, Homo Sapiens
ggccttagctgtgctcgcgcta

SEQ ID NO: 4865 - DNA, 22 bp, Homo Sapiens
gccttagctgtgctcgcgctac

SEQ ID NO: 4866 - DNA, 22 bp, Homo Sapiens
gctgtgctcgcgctactctctc

SEQ ID NO: 4867 - DNA, 22 bp, Homo Sapiens
tctggcctggaggctatccagc

SEQ ID NO: 4868 - DNA, 22 bp, Homo Sapiens
ctggcctggaggctatccagcg

SEQ ID NO: 4869 - DNA, 22 bp, Homo Sapiens
tggcctggaggctatccagcgt

SEQ ID NO: 4870 - DNA, 22 bp, Homo Sapiens
ggcctggaggctatccagcgta

SEQ ID NO: 4871 - DNA, 22 bp, Homo Sapiens
gcctggaggctatccagcgtac

SEQ ID NO: 4872 - DNA, 22 bp, Homo Sapiens
ttgcttgctttttaatattgat

SEQ ID NO: 4873 - DNA, 22 bp, Homo Sapiens
tgcttgctttttaatattgata

SEQ ID NO: 4874 - DNA, 22 bp, Homo Sapiens
gcttgctttttaatattgatat

SEQ ID NO: 4875 - DNA, 22 bp, Homo Sapiens
cttgctttttaatattgatatg

SEQ ID NO: 4876 - DNA, 22 bp, Homo Sapiens
ttgctttttaatattgatatgc

SEQ ID NO: 4877 - DNA, 22 bp, Homo Sapiens
tgctttttaatattgatatgct

SEQ ID NO: 4878 - DNA, 22 bp, Homo Sapiens
gctttttaatattgatatgctt

SEQ ID NO: 4879 - DNA, 22 bp, Homo Sapiens
ctttttaatattgatatgctta

SEQ ID NO: 4880 - DNA, 22 bp, Homo Sapiens
tttttaatattgatatgcttat

SEQ ID NO: 4881 - DNA, 22 bp, Homo Sapiens
ttttaatattgatatgcttata

SEQ ID NO: 4882 - DNA, 22 bp, Homo Sapiens
tttaatattgatatgcttatac

SEQ ID NO: 4883 - DNA, 22 bp, Homo Sapiens
ttaatattgatatgcttataca

SEQ ID NO: 4884 - DNA, 22 bp, Homo Sapiens
taatattgatatgcttatacac

SEQ ID NO: 4885 - DNA, 22 bp, Homo Sapiens
aatattgatatgcttatacact

SEQ ID NO: 4886 - DNA, 22 bp, Homo Sapiens
atattgatatgcttatacactt

SEQ ID NO: 4887 - DNA, 22 bp, Homo Sapiens
tattgatatgcttatacactta

SEQ ID NO: 4888 - DNA, 22 bp, Homo Sapiens
acaaaatgtagggttataataa

SEQ ID NO: 4889 - DNA, 22 bp, Homo Sapiens
caaaatgtagggttataataat

SEQ ID NO: 4890 - DNA, 22 bp, Homo Sapiens
aaaatgtagggttataataatg

SEQ ID NO: 4891 - DNA, 22 bp, Homo Sapiens
aaatgtagggttataataatgt

SEQ ID NO: 4892 - DNA, 22 bp, Homo Sapiens
aatgtagggttataataatgtt

SEQ ID NO: 4893 - DNA, 22 bp, Homo Sapiens
atgtagggttataataatgtta

SEQ ID NO: 4894 - DNA, 22 bp, Homo Sapiens
tgtagggttataataatgttaa

SEQ ID NO: 4895 - DNA, 22 bp, Homo Sapiens
tagggttataataatgttaaca

SEQ ID NO: 4896 - DNA, 22 bp, Homo Sapiens
agggttataataatgttaacat

SEQ ID NO: 4897 - DNA, 22 bp, Homo Sapiens
gttataataatgttaacatgga

SEQ ID NO: 4898 - DNA, 22 bp, Homo Sapiens
ttataataatgttaacatggac

SEQ ID NO: 4899 - DNA, 22 bp, Homo Sapiens
tataataatgttaacatggaca

SEQ ID NO: 4900 - DNA, 22 bp, Homo Sapiens
ataataatgttaacatggacat

SEQ ID NO: 4901 - DNA, 22 bp, Homo Sapiens
acatgatcttctttataattct

SEQ ID NO: 4902 - DNA, 22 bp, Homo Sapiens
catgatcttctttataattcta

SEQ ID NO: 4903 - DNA, 22 bp, Homo Sapiens
atgatcttctttataattctac

SEQ ID NO: 4904 - DNA, 22 bp, Homo Sapiens
tgatcttctttataattctact

SEQ ID NO: 4905 - DNA, 22 bp, Homo Sapiens
gatcttctttataattctactt

SEQ ID NO: 4906 - DNA, 22 bp, Homo Sapiens
atcttctttataattctacttt

SEQ ID NO: 4907 - DNA, 22 bp, Homo Sapiens
tcttctttataattctactttg

SEQ ID NO: 4908 - DNA, 22 bp, Homo Sapiens
cttctttataattctactttga

SEQ ID NO: 4909 - DNA, 22 bp, Homo Sapiens
ttctttataattctactttgag

SEQ ID NO: 4910 - DNA, 22 bp, Homo Sapiens
tctttataattctactttgagt

SEQ ID NO: 4911 - DNA, 22 bp, Homo Sapiens
ccacaggtagctctaggagggc

SEQ ID NO: 4912 - DNA, 22 bp, Homo Sapiens
caggtagctctaggagggctgg

SEQ ID NO: 4913 - DNA, 22 bp, Homo Sapiens
aggtagctctaggagggctggc

SEQ ID NO: 4914 - DNA, 22 bp, Homo Sapiens
ggtagctctaggagggctggca

SEQ ID NO: 4915 - DNA, 22 bp, Homo Sapiens
gggctggcaacttagaggtggg

SEQ ID NO: 4916 - DNA, 22 bp, Homo Sapiens
ggctggcaacttagaggtgggg

SEQ ID NO: 4917 - DNA, 22 bp, Homo Sapiens
ataagttaacttccaatttaca

SEQ ID NO: 4918 - DNA, 22 bp, Homo Sapiens
taagttaacttccaatttacat

SEQ ID NO: 4919 - DNA, 22 bp, Homo Sapiens
aagttaacttccaatttacata

SEQ ID NO: 4920 - DNA, 22 bp, Homo Sapiens
ggggaaaatttagaaatataat

SEQ ID NO: 4921 - DNA, 22 bp, Homo Sapiens
gggaaaatttagaaatataatt

SEQ ID NO: 4922 - DNA, 22 bp, Homo Sapiens
ggaaaatttagaaatataattg

SEQ ID NO: 4923 - DNA, 22 bp, Homo Sapiens
gaaaatttagaaatataattga

SEQ ID NO: 4924 - DNA, 22 bp, Homo Sapiens
aaaatttagaaatataattgac

SEQ ID NO: 4925 - DNA, 22 bp, Homo Sapiens
aaatttagaaatataattgaca

SEQ ID NO: 4926 - DNA, 22 bp, Homo Sapiens
aatttagaaatataattgacag

SEQ ID NO: 4927 - DNA, 22 bp, Homo Sapiens
atttagaaatataattgacagg

SEQ ID NO: 4928 - DNA, 22 bp, Homo Sapiens
tttagaaatataattgacagga

SEQ ID NO: 4929 - DNA, 22 bp, Homo Sapiens
ttagaaatataattgacaggat

SEQ ID NO: 4930 - DNA, 22 bp, Homo Sapiens
tagaaatataattgacaggatt

SEQ ID NO: 4931 - DNA, 22 bp, Homo Sapiens
agaaatataattgacaggatta

SEQ ID NO: 4932 - DNA, 22 bp, Homo Sapiens
gaaatataattgacaggattat

SEQ ID NO: 4933 - DNA, 22 bp, Homo Sapiens
aaatataattgacaggattatt

SEQ ID NO: 4934 - DNA, 22 bp, Homo Sapiens
aatataattgacaggattattg

SEQ ID NO: 4935 - DNA, 22 bp, Homo Sapiens
aggattattggaaatttgttat

SEQ ID NO: 4936 - DNA, 22 bp, Homo Sapiens
ggattattggaaatttgttata

SEQ ID NO: 4937 - DNA, 22 bp, Homo Sapiens
gattattggaaatttgttataa

SEQ ID NO: 4938 - DNA, 22 bp, Homo Sapiens
attattggaaatttgttataat

SEQ ID NO: 4939 - DNA, 22 bp, Homo Sapiens
ttattggaaatttgttataatg

SEQ ID NO: 4940 - DNA, 22 bp, Homo Sapiens
tattggaaatttgttataatga

SEQ ID NO: 4941 - DNA, 22 bp, Homo Sapiens
attggaaatttgttataatgaa

SEQ ID NO: 4942 - DNA, 22 bp, Homo Sapiens
ttggaaatttgttataatgaat

SEQ ID NO: 4943 - DNA, 22 bp, Homo Sapiens
tggaaatttgttataatgaatg

SEQ ID NO: 4944 - DNA, 22 bp, Homo Sapiens
ggaaatttgttataatgaatga

SEQ ID NO: 4945 - DNA, 22 bp, Homo Sapiens
gaaatttgttataatgaatgaa

SEQ ID NO: 4946 - DNA, 22 bp, Homo Sapiens
aaatttgttataatgaatgaaa

SEQ ID NO: 4947 - DNA, 22 bp, Homo Sapiens
aatttgttataatgaatgaaac

SEQ ID NO: 4948 - DNA, 22 bp, Homo Sapiens
atttgttataatgaatgaaaca

SEQ ID NO: 4949 - DNA, 22 bp, Homo Sapiens
tttgttataatgaatgaaacat

SEQ ID NO: 4950 - DNA, 22 bp, Homo Sapiens
ttgttataatgaatgaaacatt

SEQ ID NO: 4951 - DNA, 22 bp, Homo Sapiens
tgttataatgaatgaaacattt

SEQ ID NO: 4952 - DNA, 22 bp, Homo Sapiens
gttataatgaatgaaacatttt

SEQ ID NO: 4953 - DNA, 22 bp, Homo Sapiens
ttataatgaatgaaacattttg

SEQ ID NO: 4954 - DNA, 22 bp, Homo Sapiens
tataatgaatgaaacattttgt

SEQ ID NO: 4955 - DNA, 22 bp, Homo Sapiens
ataatgaatgaaacattttgtc

SEQ ID NO: 4956 - DNA, 22 bp, Homo Sapiens
taatgaatgaaacattttgtca

SEQ ID NO: 4957 - DNA, 22 bp, Homo Sapiens
aatgaatgaaacattttgtcat

SEQ ID NO: 4958 - DNA, 22 bp, Homo Sapiens
atgaatgaaacattttgtcata

SEQ ID NO: 4959 - DNA, 22 bp, Homo Sapiens
tgaatgaaacattttgtcatat

SEQ ID NO: 4960 - DNA, 22 bp, Homo Sapiens
gaatgaaacattttgtcatata

SEQ ID NO: 4961 - DNA, 22 bp, Homo Sapiens
aatgaaacattttgtcatataa

SEQ ID NO: 4962 - DNA, 22 bp, Homo Sapiens
atgaaacattttgtcatataag

SEQ ID NO: 4963 - DNA, 22 bp, Homo Sapiens
tgaaacattttgtcatataaga

SEQ ID NO: 4964 - DNA, 22 bp, Homo Sapiens
gaaacattttgtcatataagat

SEQ ID NO: 4965 - DNA, 22 bp, Homo Sapiens
aaacattttgtcatataagatt

SEQ ID NO: 4966 - DNA, 22 bp, Homo Sapiens
aacattttgtcatataagattc

SEQ ID NO: 4967 - DNA, 22 bp, Homo Sapiens
acattttgtcatataagattca

SEQ ID NO: 4968 - DNA, 22 bp, Homo Sapiens
cattttgtcatataagattcat

SEQ ID NO: 4969 - DNA, 22 bp, Homo Sapiens
attttgtcatataagattcata

SEQ ID NO: 4970 - DNA, 22 bp, Homo Sapiens
ttttgtcatataagattcatat

SEQ ID NO: 4971 - DNA, 22 bp, Homo Sapiens
tttgtcatataagattcatatt

SEQ ID NO: 4972 - DNA, 22 bp, Homo Sapiens
ttgtcatataagattcatattt

SEQ ID NO: 4973 - DNA, 22 bp, Homo Sapiens
tgtcatataagattcatattta

SEQ ID NO: 4974 - DNA, 22 bp, Homo Sapiens
gtcatataagattcatatttac

SEQ ID NO: 4975 - DNA, 22 bp, Homo Sapiens
tcatataagattcatatttact

SEQ ID NO: 4976 - DNA, 22 bp, Homo Sapiens
catataagattcatatttactt

SEQ ID NO: 4977 - DNA, 22 bp, Homo Sapiens
atataagattcatatttacttc

SEQ ID NO: 4978 - DNA, 22 bp, Homo Sapiens
tataagattcatatttacttct

SEQ ID NO: 4979 - DNA, 22 bp, Homo Sapiens
ataagattcatatttacttctt

SEQ ID NO: 4980 - DNA, 22 bp, Homo Sapiens
taagattcatatttacttctta

SEQ ID NO: 4981 - DNA, 22 bp, Homo Sapiens
aagattcatatttacttcttat

SEQ ID NO: 4982 - DNA, 22 bp, Homo Sapiens
agattcatatttacttcttata

SEQ ID NO: 4983 - DNA, 22 bp, Homo Sapiens
gattcatatttacttcttatac

SEQ ID NO: 4984 - DNA, 22 bp, Homo Sapiens
attcatatttacttcttataca

SEQ ID NO: 4985 - DNA, 22 bp, Homo Sapiens
ttcatatttacttcttatacat

SEQ ID NO: 4986 - DNA, 22 bp, Homo Sapiens
tcatatttacttcttatacatt

SEQ ID NO: 4987 - DNA, 22 bp, Homo Sapiens
catatttacttcttatacattt

SEQ ID NO: 4988 - DNA, 22 bp, Homo Sapiens
atatttacttcttatacatttg

SEQ ID NO: 4989 - DNA, 22 bp, Homo Sapiens
tatttacttcttatacatttga

SEQ ID NO: 4990 - DNA, 22 bp, Homo Sapiens
atttacttcttatacatttgat

SEQ ID NO: 4991 - DNA, 22 bp, Homo Sapiens
tttacttcttatacatttgata

SEQ ID NO: 4992 - DNA, 22 bp, Homo Sapiens
ttacttcttatacatttgataa

SEQ ID NO: 4993 - DNA, 22 bp, Homo Sapiens
tacttcttatacatttgataaa

SEQ ID NO: 4994 - DNA, 22 bp, Homo Sapiens
acttcttatacatttgataaag

SEQ ID NO: 4995 - DNA, 22 bp, Homo Sapiens
cttcttatacatttgataaagt

SEQ ID NO: 4996 - DNA, 22 bp, Homo Sapiens
ttcttatacatttgataaagta

SEQ ID NO: 4997 - DNA, 22 bp, Homo Sapiens
tcttatacatttgataaagtaa

SEQ ID NO: 4998 - DNA, 22 bp, Homo Sapiens
cttatacatttgataaagtaag

SEQ ID NO: 4999 - DNA, 22 bp, Homo Sapiens
ttatacatttgataaagtaagg

SEQ ID NO: 5000 - DNA, 22 bp, Homo Sapiens
gttaatctggtttatttttgtt

SEQ ID NO: 5001 - DNA, 22 bp, Homo Sapiens
ttaatctggtttatttttgttc

SEQ ID NO: 5002 - DNA, 22 bp, Homo Sapiens
tttatttttgttccacaagtta

SEQ ID NO: 5003 - DNA, 22 bp, Homo Sapiens
ttatttttgttccacaagttaa

SEQ ID NO: 5004 - DNA, 22 bp, Homo Sapiens
tatttttgttccacaagttaaa

SEQ ID NO: 5005 - DNA, 22 bp, Homo Sapiens
atttttgttccacaagttaaat

SEQ ID NO: 5006 - DNA, 22 bp, Homo Sapiens
tttttgttccacaagttaaata

SEQ ID NO: 5007 - DNA, 22 bp, Homo Sapiens
ttttgttccacaagttaaataa

SEQ ID NO: 5008 - DNA, 22 bp, Homo Sapiens
tttgttccacaagttaaataaa

SEQ ID NO: 5009 - DNA, 22 bp, Homo Sapiens
ttgttccacaagttaaataaat

SEQ ID NO: 5010 - DNA, 22 bp, Homo Sapiens
ttccacaagttaaataaatcat

SEQ ID NO: 5011 - DNA, 22 bp, Homo Sapiens
tccacaagttaaataaatcata

SEQ ID NO: 5012 - DNA, 22 bp, Homo Sapiens
ccacaagttaaataaatcataa

SEQ ID NO: 5013 - DNA, 22 bp, Homo Sapiens
cacaagttaaataaatcataaa

SEQ ID NO: 5014 - DNA, 22 bp, Homo Sapiens
acaagttaaataaatcataaaa

SEQ ID NO: 5015 - DNA, 22 bp, Homo Sapiens
caagttaaataaatcataaaac

SEQ ID NO: 5016 - DNA, 22 bp, Homo Sapiens
aagttaaataaatcataaaact

SEQ ID NO: 5017 - DNA, 22 bp, Homo Sapiens
agttaaataaatcataaaactt

SEQ ID NO: 5018 - DNA, 22 bp, Homo Sapiens
gttaaataaatcataaaacttg

SEQ ID NO: 5019 - DNA, 22 bp, Homo Sapiens
ttaaataaatcataaaacttga

SEQ ID NO: 5020 - DNA, 6654 bp, Homo Sapiens
aagtggaggcgtcgcgctggcgggcattcctgaagctgacagcattcgggccgagatgtctcgctccgtggccttagctgtgctcgcgctactctctctttctggcctggaggctatccagcgtgagtctctcctaccctcccgctctggtccttcctctcccgctctgcaccctctgtggccctcgctgtgctctctcgctccgtgacttcccttctccaagttctccttggtggcccgccgtggggctagtccagggctggatctcggggaagcggcggggtggcctgggagtggggaagggggtgcgcacccgggacgcgcgctacttgcccctttcggcggggagcaggggagacctttggcctacggcgacgggagggtcgggacaaagtttagggcgtcgataagcgtcagagcgccgaggttgggggagggtttctcttccgctctttcgcggggcctctggctcccccagcgcagctggagtgggggacgggtaggctcgtcccaaaggcgcggcgctgaggtttgtgaacgcgtggaggggcgcttggggtctgggggaggcgtcgcccgggtaagcctgtctgctgcggctctgcttcccttagactggagagctgtggacttcgtctaggcgcccgctaagttcgcatgtcctagcacctctgggtctatgtggggccacaccgtggggaggaaacagcacgcgacgtttgtagaatgcttggctgtgatacaaagcggtttcgaataattaacttatttgttcccatcacatgtcacttttaaaaaattataagaactacccgttattgacatctttctgtgtgccaaggactttatgtgctttgcgtcatttaattttgaaaacagttatcttccgccatagataactactatggttatcttctgcctctcacagatgaagaaactaaggcaccgagattttaagaaacttaattacacaggggataaatggcagcaatcgagattgaagtcaagcctaaccagggcttttgcgggagcgcatgccttttggctgtaattcgtgcatttttttttaagaaaaacgcctgccttctgcgtgagattctccagagcaaactgggcggcatgggccctgtggtcttttcgtacagagggcttcctctttggctctttgcctggttgtttccaagatgtactgtgcctcttactttcggttttgaaaacatgagggggttgggcgtggtagcttacgcctgtaatcccagcacttagggaggccgaggcgggaggatggcttgaggtccgtagttgagaccagcctggccaacatggtgaagcctggtctctacaaaaaataataacaaaaattagccgggtgtggtggctcgtgcctgtggtcccagctgctccggtggctgaggcgggaggatctcttgagcttaggcttttgagctatcatggcgccagtgcactccagcgtgggcaacagagcgagaccctgtctctcaaaaaagaaaaaaaaaaaaaaagaaagagaaaagaaaagaaagaaagaagtgaaggtttgtcagtcaggggagctgtaaaaccattaataaagataatccaagatggttaccaagactgttgaggacgccagagatcttgagcactttctaagtacctggcaatacactaagcgcgctcaccttttcctctggcaaaacatgatcgaaagcagaatgttttgatcatgagaaaattgcatttaatttgaatacaatttatttacaacataaaggataatgtatatatcaccaccattactggtatttgctggttatgttagatgtcattttaaaaaataacaatctgatatttaaaaaaaaatcttattttgaaaatttccaaagtaatacatgccatgcatagaccatttctggaagataccacaagaaacatgtaatgatgattgcctctgaaggtctattttcctcctctgacctgtgtgtgggttttgtttttgttttactgtgggcataaattaatttttcagttaagttttggaagcttaaataactctccaaaagtcataaagccagtaactggttgagcccaaattcaaacccagcctgtctgatacttgtcctcttcttagaaaagattacagtgatgctctcacaaaatcttgccgccttccctcaaacagagagttccaggcaggatgaatctgtgctctgatccctgaggcatttaatatgttcttattattagaagctcagatgcaaagagctctcttagcttttaatgttatgaaaaaaatcaggtcttcattagattccccaatccacctcttgatggggctagtagcctttccttaatgatagggtgtttctagagagatatatctggtcaaggtggcctggtactcctccttctccccacagcctcccagacaaggaggagtagctgccttttagtgatcatgtaccctgaatataagtgtatttaaaagaattttatacacatatatttagtgtcaatctgtatatttagtagcactaacacttctcttcattttcaatgaaaaatatagagtttataatattttcttcccacttccccatggatggtctagtcatgcctctcattttggaaagtactgtttctgaaacattaggcaatatattcccaacctggctagtttacagcaatcacctgtggatgctaattaaaacgcaaatcccactgtcacatgcattactccatttgatcataatggaaagtatgttctgtcccatttgccatagtcctcacctatccctgttgtattttatcgggtccaactcaaccatttaaggtatttgccagctcttgtatgcatttaggttttgtttctttgttttttagctcatgaaattaggtacaaagtcagagaggggtctggcatataaaacctcagcagaaataaagaggttttgttgtttggtaagaacataccttgggttggttgggcacggtggctcgtgcctgtaatcccaacactttgggaggccaaggcaggctgatcacttgaagttgggagttcaagaccagcctggccaacatggtgaaatcccgtctctactgaaaatacaaaaattaaccaggcatggtggtgtgtgcctgtagtcccaggaatcacttgaacccaggaggcggaggttgcagtgagctgagatctcaccactgcacactgcactccagcctgggcaatggaatgagattccatcccaaaaaataaaaaaataaaaaaataaagaacataccttgggttgatccacttaggaacctcagataataacatctgccacgtatagagcaattgctatgtcccaggcactctactagacacttcatacagtttagaaaatcagatgggtgtagatcaaggcaggagcaggaaccaaaaagaaaggcataaacataagaaaaaaaatggaaggggtggaaacagagtacaataacatgagtaatttgatgggggctattatgaactgagaaatgaactttgaaaagtatcttggggccaaatcatgtagactcttgagtgatgtgttaaggaatgctatgagtgctgagagggcatcagaagtccttgagagcctccagagaaaggctcttaaaaatgcagcgcaatctccagtgacagaagatactgctagaaatctgctagaaaaaaaacaaaaaaggcatgtatagaggaattatgagggaaagataccaagtcacggtttattcttcaaaatggaggtggcttgttgggaaggtggaagctcatttggccagagtggaaatggaattgggagaaatcgatgaccaaatgtaaacacttggtgcctgatatagcttgacaccaagttagccccaagtgaaataccctggcaatattaatgtgtcttttcccgatattcctcaggtactccaaagattcaggtttactcacgtcatccagcagagaatggaaagtcaaatttcctgaattgctatgtgtctgggtttcatccatccgacattgaagttgacttactgaagaatggagagagaattgaaaaagtggagcattcagacttgtctttcagcaaggactggtctttctatctcttgtactacactgaattcacccccactgaaaaagatgagtatgcctgccgtgtgaaccatgtgactttgtcacagcccaagatagttaagtggggtaagtcttacattcttttgtaagctgctgaaagttgtgtatgagtagtcatatcataaagctgctttgatataaaaaaggtctatggccatactaccctgaatgagtcccatcccatctgatataaacaatctgcatattgggattgtcagggaatgttcttaaagatcagattagtggcacctgctgagatactgatgcacagcatggtttctgaaccagtagtttccctgcagttgagcagggagcagcagcagcacttgcacaaatacatatacactcttaacacttcttacctactggcttcctctagcttttgtggcagcttcaggtatatttagcactgaacgaacatctcaagaaggtataggcctttgtttgtaagtcctgctgtcctagcatcctataatcctggacttctccagtactttctggctggattggtatctgaggctagtaggaagggcttgttcctgctgggtagctctaaacaatgtattcatgggtaggaacagcagcctattctgccagccttatttctaaccattttagacatttgttagtacatggtattttaaaagtaaaacttaatgtcttccttttttttctccactgtctttttcatagatcgagacatgtaagcagcatcatggaggtaagtttttgaccttgagaaaatgtttttgtttcactgtcctgaggactatttatagacagctctaacatgataaccctcactatgtggagaacattgacagagtaacattttagcagggaaagaagaatcctacagggtcatgttcccttctcctgtggagtggcatgaagaaggtgtatggccccaggtatggccatattactgaccctctacagagagggcaaaggaactgccagtatggtattgcaggataaaggcaggtggttacccacattacctgcaaggctttgatctttcttctgccatttccacattggacatctctgctgaggagagaaaatgaaccactcttttcctttgtataatgttgttttattcttcagacagaagagaggagttatacagctctgcagacatcccattcctgtatggggactgtgtttgcctcttagaggttcccaggccactagaggagataaagggaaacagattgttataacttgatataatgatactataatagatgtaactacaaggagctccagaagcaagagagagggaggaacttggacttctctgcatctttagttggagtccaaaggcttttcaatgaaattctactgcccagggtacattgatgctgaaaccccattcaaatctcctgttatattctagaacagggaattgatttgggagagcatcaggaaggtggatgatctgcccagtcacactgttagtaaattgtagagccaggacctgaactctaatatagtcatgtgttacttaatgacggggacatgttctgagaaatgcttacacaaacctaggtgttgtagcctactacacgcataggctacatggtatagcctattgctcctagactacaaacctgtacagcctgttactgtactgaatactgtgggcagttgtaacacaatggtaagtatttgtgtatctaaacatagaagttgcagtaaaaatatgctattttaatcttatgagaccactgtcatatatacagtccatcattgaccaaaacatcatatcagcattttttcttctaagattttgggagcaccaaagggatacactaacaggatatactctttataatgggtttggagaactgtctgcagctacttcttttaaaaaggtgatctacacagtagaaattagacaagtttggtaatgagatctgcaatccaaataaaataaattcattgctaacctttttcttttcttttcaggtttgaagatgccgcatttggattggatgaattccaaattctgcttgcttgctttttaatattgatatgcttatacacttacactttatgcacaaaatgtagggttataataatgttaacatggacatgatcttctttataattctactttgagtgctgtctccatgtttgatgtatctgagcaggttgctccacaggtagctctaggagggctggcaacttagaggtggggagcagagaattctcttatccaacatcaacatcttggtcagatttgaactcttcaatctcttgcactcaaagcttgttaagatagttaagcgtgcataagttaacttccaatttacatactctgcttagaatttgggggaaaatttagaaatataattgacaggattattggaaatttgttataatgaatgaaacattttgtcatataagattcatatttacttcttatacatttgataaagtaaggcatggttgtggttaatctggtttatttttgttccacaagttaaataaatcataaaacttga

SEQ ID NO: 5021 - DNA, 360 bp, Homo Sapiens; identical to SEQ ID NO: 392

SEQ ID NO: 5022 - DNA, 502 bp, Homo Sapiens
gaattcccaagctgtagttataaacagaagttctccttctgctaggtagcattcaaagatcttaatcttctgggtttccgttttctcgaatgaaaaatgcaggtccgagcagttaactggctggggcaccattagcaagtcacttagcatctctggggccagtctgcaaagcgagggggcagccttaatgtgcctccagcctgaagtcctagaatgagcgcccggtgtcccaagctggggcgcgcaccccagatcggagggcgccgatgtacagacagcaaactcacccagtctagtgcatgccttcttaaacatcacgagactctaagaaaaggaaactgaaaacgggaaagtccctctctctaacctggcactgcgtcgctggcttggagacaggtgacggtccctgcgggccttgtcctgattggctgggcacgcgtttaatataagtggaggcgtcgcgctggcgggcattcctgaagctgacagcattcgggccgag

SEQ ID NO: 5023 - protein, 64 aa, Homo Sapiens
YGSQSSKPYLLTHPSDPLELVVSGPSGGPSSPTTGPTSTSGPEDQPLTPTGSDPQSGLGRHLGV

SEQ ID NO: 5024 - protein, 44 aa, Homo Sapiens
VVSGPSGGPSSPTTGPTSTSGPEDQPLTPTGSDPQSGLGRHLGV

SEQ ID NO: 5025 - protein, 67 aa, Homo Sapiens
AGSGGSGGSGGSPVPSTPPTPSPSTPPTPSPSGGSGNSSGSGGSPVPSTPPTPSPSTPPTPSPSASV

SEQ ID NO: 5026 - protein, 75 aa, Homo Sapiens
AGSGGSGGSGGSPVPSTPPTNSSSTPPTPSPSPVPSTPPTNSSSTPPTPSPSPVPSTPPTNSSSTPPTPSPSASV

SEQ ID NO: 5027 - protein, 85 aa, Homo Sapiens
VVSGPSGGPSSPTTGPTSTSGPEDQPLTPTGSDPQSGLGRHVVSGPSGGPSSPTTGPTSTSGPEDQPLTPTGSDPQSGLGRHLGV

SEQ ID NO: 5028 - protein, 32 aa, Homo Sapiens
TTGPTSTSGPEDQPLTPTGSDPQSGLGRHLGV

SEQ ID NO: 5029 - RNA, 943 nt, Homo Sapiens
auuccugaagcugacagcauucgggccgagaugucucgcuccguggccuuagcugugcucgcgcuacucucucuuucuggccuggaggcuauccagcguacuccaaagauucagguuuacucacgucauccagcagagaauggaaagucaaauuuccugaauugcuaugugucuggguuucauccauccgacauugaaguugacuuacugaagaauggagagagaauugaaaaaguggagcauucagacuugucuuucagcaaggacuggucuuucuaucucuuguacuacacugaauucacccccacugaaaaagaugaguaugccugccgugugaaccaugugacuuugucacagcccaagauaguuaagugggaucgagacauguaagcagcaucauggagguuugaagaugccgcauuuggauuggaugaauuccaaauucugcuugcuugcuuuuuaauauugauaugcuuauacacuuacacuuuaugcacaaaauguaggguuauaauaauguuaacauggacaugaucuucuuuauaauucuacuuugagugcugucuccauguuugauguaucugagcagguugcuccacagguagcucuaggagggcuggcaacuuagagguggggagcagagaauucucuuauccaacaucaacaucuuggucagauuugaacucuucaaucucuugcacucaaagcuuguuaagauaguuaagcgugcauaaguuaacuuccaauuuacauacucugcuuagaauuugggggaaaauuuagaaauauaauugacaggauuauuggaaauuuguuauaaugaaugaaacauuuugucauauaagauucauauuuacuucuuauacauuugauaaaguaaggcaugguugugguuaaucugguuuauuuuuguuccacaaguuaaauaaaucauaaaacuuga

SEQ ID NO: 5030 - DNA, 4 bp, Artificial Sequence
  Loop sequence
cgaa

SEQ ID NO: 5031 - RNA, 7 nt, Artificial Sequence
  B7 loop sequence
uucaaga

SEQ ID NO: 5032 - RNA, 7 nt, Artificial Sequence
  C7 loop sequence
auauuca

SEQ ID NO: 5033 - RNA, 9 nt, Artificial Sequence
  T9 loop sequence
ugugcuguc

SEQ ID NO: 5034 - RNA, 6 nt, Artificial Sequence
  S6 loop sequence
cucgag

SEQ ID NO: 5035 - RNA, 12 nt, Artificial Sequence
  L12 loop sequence
cuuccugucaga

SEQ ID NO: 5036 - RNA, 15 nt, Artificial Sequence
  M15 loop sequence
cuucccuuugucaga

SEQ ID NO: 5037 - RNA, 12 nt, Artificial Sequence
  A34 loop sequence
guguuauucuug

SEQ ID NO: 5038 - RNA, 12 nt, Artificial Sequence
  A5 loop sequence
gugucuuaauug

SEQ ID NO: 5039 - RNA, 12 nt, Artificial Sequence
  A6 loop sequence
guguuagucuug

SEQ ID NO: 5040 - RNA, 7 nt, Artificial Sequence
  psiRNA loop sequence
ucaagag

SEQ ID NO: 5041 - RNA, 12 nt, Artificial Sequence
  miR-125 loop sequence
ggacauccaggg

SEQ ID NO: 5042 - RNA, 15 nt, Artificial Sequence
  miR-30 loop sequence
gugaagccacagaug

SEQ ID NO: 5043 - RNA, 10 nt, Artificial Sequence
  miR-16 loop sequence
gauucuaaaa

SEQ ID NO: 5044 - DNA, 2 bp, Artificial Sequence
  5' flank sequence
gg

SEQ ID NO: 5045 - RNA, 23 nt, Artificial Sequence
  miR-125 5' flank sequence
acaccauguugccagucucuagg

SEQ ID NO: 5046 - RNA, 23 nt, Artificial Sequence
  miR-16 5' flank sequence
ugauagcaaugucagcagugccu

SEQ ID NO: 5047 - RNA, 23 nt, Artificial Sequence
  miR-30 5' flank sequence
uauugcuguugacagugagcgac

SEQ ID NO: 5048 - RNA, 21 nt, Artificial Sequence
  miR-125 3' flank sequence
uggcgucuggcccaaccacac

SEQ ID NO: 5049 - RNA, 21 nt, Artificial Sequence
  miR-16 3' flank sequence
guaagguugaccauacucuac

SEQ ID NO: 5050 - RNA, 21 nt, Artificial Sequence
  miR-30 3' flank sequence
ugccuacugccucggacuuca

SEQ ID NO: 5051 - DNA, 249 bp, Artificial Sequence
  U6 promoter sequence
gagggcctatttcccatgattccttcatatttgcatatacgatacaaggctgttagagagataattggaattaatttgactgtaaacacaaagatattagtacaaaatacgtgacgtagaaagtaataatttcttgggtagtttgcagttttaaaattatgttttaaaatggactatcatatgcttaccgtaacttgaaagtatttcgatttcttggctttatatatcttgtggaaaggacgaaacacc

SEQ ID NO: 5052 - DNA, 230 bp, Artificial Sequence
  H1 promoter sequence
ggaattcgaacgctgacgtcatcaacccgctccaaggaatcgcgggcccagtgtcactaggcgggaacacccagcgcgcgtgcgccctggcaggaagatggctgtgagggacaggggagtggcgccctgcaatatttgcatgtcgctatgtgttctgggaaatcaccataaacgtgaaatgtctttggatttgggaatcttataagttctgtatgagaccactctttccc

SEQ ID NO: 5053 - DNA, 243 bp, Artificial Sequence
  7SK promoter sequence
ctgcagtatttagcatgccccacccatctgcaaggcattctggatagtgtcaaaacagccggaaatcaagtccgtttatctcaaactttagcattttgggaataaatgatatttgctatgctggttaaattagattttagttaaatttcctgctgaagctctagtacgataagtaacttgacctaagtgtaaagttgagatttccttcaggtttatatagcttgtgcgccgcctgggtacctc

SEQ ID NO: 5054 - DNA, 1335 bp, Artificial Sequence
  Ef1a promoter sequence
gagtaattcatacaaaaggactcgcccctgccttggggaatcccagggaccgtcgttaaactcccactaacgtagaacccagagatcgctgcgttcccgccccctcacccgcccgctctcgtcatcactgaggtggagaagagcatgcgtgaggctccggtgcccgtcagtgggcagagcgcacatcgcccacagtccccgagaagttggggggaggggtcggcaattgaaccggtgcctagagaaggtggcgcggggtaaactgggaaagtgatgtcgtgtactggctccgcctttttcccgagggtgggggagaaccgtatataagtgcagtagtcgccgtgaacgttctttttcgcaacgggtttgccgccagaacacaggtaagtgccgtgtgtggttcccgcgggcctggcctctttacgggttatggcccttgcgtgccttgaattacttccacgcccctggctgcagtacgtgattcttgatcccgagcttcgggttggaagtgggtgggagagttcgaggccttgcgcttaaggagccccttcgcctcgtgcttgagttgaggcctggcttgggcgctggggccgccgcgtgcgaatctggtggcaccttcgcgcctgtctcgctgctttcgataagtctctagccatttaaaatttttgatgacctgctgcgacgctttttttctggcaagatagtcttgtaaatgcgggccaagatctgcacactggtatttcggtttttggggccgcgggcggcgacggggcccgtgcgtcccagcgcacatgttcggcgaggcggggcctgcgagcgcggccaccgagaatcggacgggggtagtctcaagctggccggcctgctctggtgcctggcctcgcgccgccgtgtatcgccccgccctgggcggcaaggctggcccggtcggcaccagttgcgtgagcggaaagatggccgcttcccggccctgctgcagggagctcaaaatggaggacgcggcgctcgggagagcgggcgggtgagtcacccacacaaaggaaaagggcctttccgtcctcagccgtcgcttcatgtgactccacggagtaccgggcgccgtccaggcacctcgattagttctcgagcttttggagtacgtcgtctttaggttggggggaggggttttatgcgatggagtttccccacactgagtgggtggagactgaagttaggccagcttggcacttgatgtaattctccttggaatttgccctttttgagtttggatcttggttcattctcaagcctcagacagtggttcaaagtttttttcttccatttcaggtgtcgtga

SEQ ID NO: 5055 - DNA, 46 bp, Artificial Sequence
  B2M shRNA
gcactcaaagcttgttaagatcgaaatcttaacaagctttgagtgc

SEQ ID NO: 5056 - DNA, 46 bp, Artificial Sequence
  B2M shRNA
gttaacttccaatttacataccgaagtatgtaaattggaagttaac

SEQ ID NO: 5057 - protein, 239 aa, Artificial Sequence
  MSLN scFv domain
QVQLQQSGPELEKPGASVKISCKASGYSFTGYTMNWVKQSHGKSLEWIGLITPYNGASSYNQKFRGKATLTVDKSSSTAYMDLLSLTSEDSAVYFCARGGYDGRGFDYWGQGTTVTVSSGGGGSGGGGSGGGGSDIELTQSPAIMSASPGEKVTMTCSASSSVSYMHWYQQKSGTSPKRWIYDTSKLASGVPGRFSGSGSGNSYSLTISSVEAEDDATYYCQQWSGYPLTFGAGTKLEI

SEQ ID NO: 5058 - protein, 245 aa, Artificial Sequence
  MSLN scFv domain
EVQLVESGGGLVKPGGSLRLSCAASGFTFSNAWMSWVRQAPGKGLEWVGRIKSKTDGGTTDYAAPVKGRFTISRDDSKNTLYLQMNSLKTEDTAVYYCTTDLPKLRNFHIWGQGTLVTVSSGGGGSGGGGSGGGGSGGDIQMTQSPSSLSASVGDRVTITCRASQSISSYLNWYQQKPGKAPKLLIYAASSLQSGVPSRFSGSGSGTDFTLTISSLQPEDFATYYCQQSYSTPLTFGGGTKVEIK

SEQ ID NO: 5059 - protein, 248 aa, Artificial Sequence
  MSLN scFv domain
EVQLVESGGGLVQPGGSLRLSCAASGFTFSSYAMHWVRQAPGKGLEYVSAISSNGGSTYYANSVKGRFTISRDNSKNTLYLQMGSLRAEDMAVYYCASLEYHGFRQYGLRYWHWGQGTLVTVSSGGGGSGGGGSGGGGSGGDIQMTQSPSSLSASVGDRVTITCRASQSISSYLNWYQQKPGKAPKLLIYAASSLQSGVPSRFSGSGSGTDFTLTISSLQPEDFATYYCQQSYSTPLTFGGGTKVEIK

SEQ ID NO: 5060 - protein, 247 aa, Artificial Sequence
  MSLN scFv domain
QLQLQESGSGLVKPSQTLSLTCAVSGGSISSGGYSWSWIRQPPGKGLEWIGYIYHSGSTYYNPSLKSRVTISVDRSKNQFSLKLSSVTAADTAVYYCASIKFWFAGINYFFPWGQGTLVTVSSGGGGSGGGGSGGGGSGGDIQMTQSPSSLSASVGDRVTITCRASQSISSYLNWYQQKPGKAPKLLIYAASSLQSGVPSRFSGSGSGTDFTLTISSLQPEDFATYYCQQSYSTPLTFGGGTKVEIK

SEQ ID NO: 5061 - protein, 243 aa, Artificial Sequence
  MSLN scFv domain
EVQLVESGGGLVQPGGSLRLSCAASGFTFSSYWMHWVRQAPGKGLVWVSRINSDGSSTSYADSVKGRFTISRDNAKNTLYLQMNSLRAEDTAVYYCASGFLGMGSNFIWGQGTLVTVSSGGGGSGGGGSGGGGSGGDIQMTQSPSSLSASVGDRVTITCRASQSISSYLNWYQQKPGKAPKLLIYAASSLQSGVPSRFSGSGSGTDFTLTISSLQPEDFATYYCQQSYSTPLTFGGGTKVEIK

SEQ ID NO: 5062 - protein, 243 aa, Artificial Sequence
  MSLN scFv domain
QVQLQESGPGLVKPSQTLSLTCTVSGGSISSGGYYWSWIRQHPGKGLEWIGYIYYSGSTYYNPSLKSLVTISVDTSKNQFSLKLSSVTAADTAVYYCASGDRARYFDLWGRGTLVTVSSGGGGSGGGGSGGGGSGGDIQMTQSPSSLSASVGDRVTITCRASQSISSYLNWYQQKPGKAPKLLIYAASSLQSGVPSRFSGSGSGTDFTLTISSLQPEDFATYYCQQSYSTPLTFGGGTKVEIK

SEQ ID NO: 5063 - protein, 247 aa, Artificial Sequence
  MSLN scFv domain
EVQLVESGGGLVQPGGSLRLSCAASGFTFSSYWMHWVRQAPGKGLVWVSRINSDGSSTSYADSVKGRFTISRDNAKNTLYLQMNSLRAEDTAVYYCARYPRGYHQMVDAFDIWGQGTMVTVSSGGGGSGGGGSGGGGSGGDIQMTQSPSSLSASVGDRVTITCRASQSISSYLNWYQQKPGKAPKLLIYAASSLQSGVPSRFSGSGSGTDFTLTISSLQPEDFATYYCQQSYSTPLTFGGGTKVEIK

SEQ ID NO: 5064 - protein, 250 aa, Artificial Sequence
  MSLN scFv domain
QLQLQESGPGLVKPSETLSLTCTVSGGSISSSSYYWGWIRQPPGKGLEWIGSIYYSGSTYYNPSLKSRVTISVDTSKNQFSLKLSSVTAADTAVYYCARVRFLAARTTIPEANFLWGQGTLVTVSSGGGGSGGGGSGGGGSGGDIQMTQSPSSLSASVGDRVTITCRASQSISSYLNWYQQKPGKAPKLLIYAASSLQSGVPSRFSGSGSGTDFTLTISSLQPEDFATYYCQQSYSTPLTFGGGTKVEIK

SEQ ID NO: 5065 - protein, 242 aa, Artificial Sequence
  MSLN scFv domain
EVQLVESGGGLVQPGGSLRLSCAASGFTFSSYSMNWVRQAPGKGLEWVSYISSSSSTIYYADSVKGRFTISRDNAKNSLYLQMNSLRAEDTAVYYCARVLSRARFDYWGQGTLVTVSSGGGGSGGGGSGGGGSGGDIQMTQSPSSLSASVGDRVTITCRASQSISSYLNWYQQKPGKAPKLLIYAASSLQSGVPSRFSGSGSGTDFTLTISSLQPEDFATYYCQQSYSTPLTFGGGTKVEIK

SEQ ID NO: 5066 - protein, 241 aa, Artificial Sequence
  MSLN scFv domain
EVQLVESGGGLVKPGGSLRLSCAASGFTFSSYSMNWVRQAPGKGLEWVSSISSSSSYIYYADSVKGRFTISRDNAKNSLYLQMNSLRAEDTAVYYCARLRGRVFDPWGQGTLVTVSSGGGGSGGGGSGGGGSGGDIQMTQSPSSLSASVGDRVTITCRASQSISSYLNWYQQKPGKAPKLLIYAASSLQSGVPSRFSGSGSGTDFTLTISSLQPEDFATYYCQQSYSTPLTFGGGTKVEIK

SEQ ID NO: 5067 - protein, 247 aa, Artificial Sequence
  MSLN scFv domain
QLQLQESGPGLVKPSETLSLTCTVSGGSISSSSYYWGWIRQPPGKGLEWIGSIYYSGSTYYNPSLKSRVTISVDTSKNQFSLKLSSVTAADTAVYYCARIKFTSFLYVHGFLWGQGTLVTVSSGGGGSGGGGSGGGGSGGDIQMTQSPSSLSASVGDRVTITCRASQSISSYLNWYQQKPGKAPKLLIYAASSLQSGVPSRFSGSGSGTDFTLTISSLQPEDFATYYCQQSYSTPLTFGGGTKVEIK

SEQ ID NO: 5068 - protein, 246 aa, Artificial Sequence
  MSLN scFv domain
QVQLVQSGAEVKKPGASVKVSCKASGYTFTSYAMHWVRQAPGQRLEWMGWINAGNGNTKYSQKFQGRVTITRDTSASTAYMELSSLRSEDTAVYYCARGQRWLYLGGIRRHWGQGTLVTVSSGGGGSGGGGSGGGGSGGDIQMTQSPSSLSASVGDRVTITCRASQSISSYLNWYQQKPGKAPKLLIYAASSLQSGVPSRFSGSGSGTDFTLTISSLQPEDFATYYCQQSYSTPLTFGGGTKVEIK

SEQ ID NO: 5069 - protein, 244 aa, Artificial Sequence
  MSLN scFv domain
QVQLQESGPGLVKPSETLSLTCTVSGGSISSYYWSWIRQPPGKGLEWIGYIYYSGSTNYNPSLKSRVTISVDTSKNQFSLKLSSVTAADTAVYYCAREWIPSRPYYFDYWGQGTLVTVSSGGGGSGGGGSGGGGSGGDIQMTQSPSSLSASVGDRVTITCRASQSISSYLNWYQQKPGKAPKLLIYAASSLQSGVPSRFSGSGSGTDFTLTISSLQPEDFATYYCQQSYSTPLTFGGGTKVEIK

SEQ ID NO: 5070 - protein, 244 aa, Artificial Sequence
  MSLN scFv domain
QVQLQESGPGLVKPSQTLSLTCTVSGGSISSGGYYWSWIRQPPGKGLEWIGYIYYSGSTYYNPSLKSRVTISVDTSKNQFSLKLSSVTAADTAVYYCARESTGTGAFDIWGQGTMVTVSSGGGGSGGGGSGGGGSGGDIQMTQSPSSLSASVGDRVTITCRASQSISSYLNWYQQKPGKAPKLLIYAASSLQSGVPSRFSGSGSGTDFTLTISSLQPEDFATYYCQQSYSTPLTFGGGTKVEIK

SEQ ID NO: 5071 - protein, 246 aa, Artificial Sequence
  MSLN scFv domain
EVQLVESGGGVVRPGGSLRLSCAASGFTFDDYGMSWVRQAPGKGLEWVSGINWNGGSTGYADSVKGRFTISRDNAKNSLYLQMNSLRAEDTALYHCARERYRRVLHWYFDLWGRGTLVTVSSGGGGSGGGGSGGGGSGGDIQMTQSPSSLSASVGDRVTITCRASQSISSYLNWYQQKPGKAPKLLIYAASSLQSGVPSRFSGSGSGTDFTLTISSLQPEDFATYYCQQSYSTPLTFGGGTKVEIK

SEQ ID NO: 5072 - protein, 240 aa, Artificial Sequence
  MSLN scFv domain
QVQLVQSGAEVKKPGASVKVSCKASGYTFTSYDINWVRQATGQGLEWMGWMNPNSGNTGYAQKFQGRVTMTRNTSISTAYMELSSLRSEDTAVYYCAREPDAFDIWGQGTMVTVSSGGGGSGGGGSGGGGSGGDIQMTQSPSSLSASVGDRVTITCRASQSISSYLNWYQQKPGKAPKLLIYAASSLQSGVPSRFSGSGSGTDFTLTISSLQPEDFATYYCQQSYSTPLTFGGGTKVEIK

SEQ ID NO: 5073 - protein, 246 aa, Artificial Sequence
  MSLN scFv domain
QVQLQESGPGLVKPSQTLSLTCTVSGGSISSGGYYWSWIRQPPGKGLEWIGYIYYSGSTYYNPSLKSRVTISVDTSKNQFSLKLSSVTAADTAVYYCAREHMGTIPYYFDYWGQGTLVTVSSGGGGSGGGGSGGGGSGGDIQMTQSPSSLSASVGDRVTITCRASQSISSYLNWYQQKPGKAPKLLIYAASSLQSGVPSRFSGSGSGTDFTLTISSLQPEDFATYYCQQSYSTPLTFGGGTKVEIK

SEQ ID NO: 5074 - protein, 244 aa, Artificial Sequence
  MSLN scFv domain
QVQLQESGPGLVKPSQTLSLTCTVSGGSISSGGYYWSWIRQPPGKGLEWIGYIYYSGSTYYNPSLKSRVTISVDTSKNQFSLKLSSVTAADTAVYYCAREEFGYGDVLYWGQGTLVTVSSGGGGSGGGGSGGGGSGGDIQMTQSPSSLSASVGDRVTITCRASQSISSYLNWYQQKPGKAPKLLIYAASSLQSGVPSRFSGSGSGTDFTLTISSLQPEDFATYYCQQSYSTPLTFGGGTKVEIK

SEQ ID NO: 5075 - protein, 244 aa, Artificial Sequence
  MSLN scFv domain
QVQLQESGPGLVKPSQTLSLTCTVSGGSISSGDYYWSWIRQPPGKGLEWIGYIYYSGSTYYNPSLKSRVTISVDTSKNQFSLKLSSVTAADTAVYYCAREDVVKGAFDIWGQGTMVTVSSGGGGSGGGGSGGGGSGGDIQMTQSPSSLSASVGDRVTITCRASQSISSYLNWYQQKPGKAPKLLIYAASSLQSGVPSRFSGSGSGTDFTLTISSLQPEDFATYYCQQSYSTPLTFGGGTKVEIK

SEQ ID NO: 5076 - protein, 245 aa, Artificial Sequence
  MSLN scFv domain
EVQLVESGGGLVQPGGSLRLSCAASGFTFSSYSMNWVRQAPGKGLEWVSYISSSSSTIYYADSVKGRFTISRDNAKNSLYLQMNSLRAEDTAVYYCAREDFSHKLGYFQHWGQGTLVTVSSGGGGSGGGGSGGGGSGGDIQMTQSPSSLSASVGDRVTITCRASQSISSYLNWYQQKPGKAPKLLIYAASSLQSGVPSRFSGSGSGTDFTLTISSLQPEDFATYYCQQSYSTPLTFGGGTKVEIK

SEQ ID NO: 5077 - protein, 238 aa, Artificial Sequence
  MSLN scFv domain
QVQLVESGGGLVKPGGSLRLSCAASGFTFSDYYMSWIRQAPGKGLEWVSYISSSGSTIYYADSVKGRFTISRDNAKNSLYLQMNSLRAEDTAVYYCARDYDYVWGQGTLVTVSSGGGGSGGGGSGGGGSGGDIQMTQSPSSLSASVGDRVTITCRASQSISSYLNWYQQKPGKAPKLLIYAASSLQSGVPSRFSGSGSGTDFTLTISSLQPEDFATYYCQQSYSTPLTFGGGTKVEIK

SEQ ID NO: 5078 - protein, 244 aa, Artificial Sequence
  MSLN scFv domain
QVQLQESGPGLVKPSQTLSLTCTVSGGSISSGDYYWSWIRQPPGKGLEWIGYIYYSGSTYYNPSLKSRVTISVDTSKNQFSLKLSSVTAADTAVYYCARDRRDWDWFDPWGQGTLVTVSSGGGGSGGGGSGGGGSGGDIQMTQSPSSLSASVGDRVTITCRASQSISSYLNWYQQKPGKAPKLLIYAASSLQSGVPSRFSGSGSGTDFTLTISSLQPEDFATYYCQQSYSTPLTFGGGTKVEIK

SEQ ID NO: 5079 - protein, 243 aa, Artificial Sequence
  MSLN scFv domain
QVQLQESGPGLVKPSGTLSLTCAVSGGSISSSNWWSWVRQPPGKGLEWIGEIYHSGSTNYNPSLKSRVTISVDKSKNQFSLKLSSVTAADTAVYYCARDQQALKYRVDWGQGTLVTVSSGGGGSGGGGSGGGGSGGDIQMTQSPSSLSASVGDRVTITCRASQSISSYLNWYQQKPGKAPKLLIYAASSLQSGVPSRFSGSGSGTDFTLTISSLQPEDFATYYCQQSYSTPLTFGGGTKVEIK

SEQ ID NO: 5080 - protein, 242 aa, Artificial Sequence
  MSLN scFv domain
QVQLVQSGAEVKKPGASVKVSCKASGYTFTSYGISWVRQAPGQGLEWMGWISAYNGNTNYAQKLQGRVTMTTDTSTSTAYMELRSLRSDDTAVYYCARDLTLGCFDYWGQGTLVTVSSGGGGSGGGGSGGGGSGGDIQMTQSPSSLSASVGDRVTITCRASQSISSYLNWYQQKPGKAPKLLIYAASSLQSGVPSRFSGSGSGTDFTLTISSLQPEDFATYYCQQSYSTPLTFGGGTKVEIK

SEQ ID NO: 5081 - protein, 242 aa, Artificial Sequence
  MSLN scFv domain
EVQLVESGGGLVQPGGSLRLSCAASGFTVSSNYMSWVRQAPGKGLEWVSVIYSGGSTYYADSVKGRFTISRDNSKNTLYLQMNSLRAEDTAVYYCARDGSNSWYFDLWGRGTLVTVSSGGGGSGGGGSGGGGSGGDIQMTQSPSSLSASVGDRVTITCRASQSISSYLNWYQQKPGKAPKLLIYAASSLQSGVPSRFSGSGSGTDFTLTISSLQPEDFATYYCQQSYSTPLTFGGGTKVEIK

SEQ ID NO: 5082 - protein, 242 aa, Artificial Sequence
  MSLN scFv domain
QVQLVESGGGVVQPGRSLRLSCAASGFTFSSYGMHWVRQAPGKGLEWVAVIWYDGSNKYYADSVKGRFTISRDNSKNTLYLQMNSLRAEDTAVYYCARAFLFLSFSVWGQGTLVTVSSGGGGSGGGGSGGGGSGGDIQMTQSPSSLSASVGDRVTITCRASQSISSYLNWYQQKPGKAPKLLIYAASSLQSGVPSRFSGSGSGTDFTLTISSLQPEDFATYYCQQSYSTPLTFGGGTKVEIK

SEQ ID NO: 5083 - protein, 245 aa, Artificial Sequence
  MSLN scFv domain
EVQLVESGGVVVQPGGSLRLSCAASGFTFDDYTMHWVRQAPGKGLEWVSLISWDGGSTYYADSVKGRFTISRDNSKNSLYLQMNSLRTEDTALYYCAKGIFYSSKEDFDYWGQGTLVTVSSGGGGSGGGGSGGGGSGGDIQMTQSPSSLSASVGDRVTITCRASQSISSYLNWYQQKPGKAPKLLIYAASSLQSGVPSRFSGSGSGTDFTLTISSLQPEDFATYYCQQSYSTPLTFGGGTKVEIK

SEQ ID NO: 5084 - protein, 248 aa, Artificial Sequence
  MSLN scFv domain
EVQLVESGGVVVQPGGSLRLSCAASGFTFDDYTMHWVRQAPGKGLEWVSLISWDGGSTYYADSVKGRFTISRDNSKNSLYLQMNSLRTEDTALYYCAKDIWIFYSSNPKPTVYWGQGTLVTVSSGGGGSGGGGSGGGGSGGDIQMTQSPSSLSASVGDRVTITCRASQSISSYLNWYQQKPGKAPKLLIYAASSLQSGVPSRFSGSGSGTDFTLTISSLQPEDFATYYCQQSYSTPLTFGGGTKVEIK

SEQ ID NO: 5085 - protein, 246 aa, Artificial Sequence
  MSLN scFv domain
QVQLVQSGSELKKPGASVKVSCKASGYTFTSYAMNWVRQAPGQGLEWMGWINTNTGNPTYAQGFTGRFVFSFDTSVSTAYLQICSLKAEDTAVYYCARKDQTLTYGNWFDPWGQGTLVTVSSGGGGSGGGGSGGGGSGGDIQMTQSPSSLSASVGDRVTITCRASQSISSYLNWYQQKPGKAPKLLIYAASSLQSGVPSRFSGSGSGTDFTLTISSLQPEDFATYYCQQSYSTPLTFGGGTKVEIK

SEQ ID NO: 5086 - protein, 242 aa, Artificial Sequence
  MSLN scFv domain
QVQLQESGPGLVKPSETLSLTCTVSGGSVSSGSYYWSWIRQPPGKGLEWIGYIYYSGSTNYNPSLKSRVTISVDTSKNQFSLKLSSVTAADTAVYYCARDHYERGLYWGQGTLVTVSSGGGGSGGGGSGGGGSGGDIQMTQSPSSLSASVGDRVTITCRASQSISSYLNWYQQKPGKAPKLLIYAASSLQSGVPSRFSGSGSGTDFTLTISSLQPEDFATYYCQQSYSTPLTFGGGTKVEIK

SEQ ID NO: 5087 - protein, 242 aa, Artificial Sequence
  MSLN scFv domain
QVQLVESGGGLVKPGGSLRLSCAASGFTFSDYYMSWIRQAPGKGLEWVSYISSSGSTIYYADSVKGRFTISRDNAKNSLYLQMNSLRAEDTAVYYCARYMYNWYFDLWGRGTLVTVSSGGGGSGGGGSGGGGSGGDIQMTQSPSSVSASVGDRVTITCRASQGISSWLAWYQQKPGKAPKLLIYAASSLQSGVPSRFSGSGSGTDFTLTISSLQPEDFATYYCQQANSFPLTFGGGTKVEIK

SEQ ID NO: 5088 - protein, 241 aa, Artificial Sequence
  MSLN scFv domain
QVQLVESGGGLVKPGGSLRLSCAASGFTFSDYYMSWIRQAPGKGLEWVSYISSSGSTIYYADSVKGRFTISRDNAKNSLYLQMNSLRAEDTAVYYCARDRRPAFDIWGQGTMVTVSSGGGGSGGGGSGGGGSGGDIQMTQSPSSVSASVGDRVTITCRASQGISSWLAWYQQKPGKAPKLLIYAASSLQSGVPSRFSGSGSGTDFTLTISSLQPEDFATYYCQQANSFPLTFGGGTKVEIK

SEQ ID NO: 5089 - protein, 243 aa, Artificial Sequence
  MSLN scFv domain
QVQLVESGGGLVKPGGSLRLSCAASGFTFSDYYMSWIRQAPGKGLEWVSYISSSGSTIYYADSVKGRFTISRDNAKNSLYLQMNSLRAEDTAVYYCAVHLKRRPYFDYWGQGTLVTVSSGGGGSGGGGSGGGGSGGAIQLTQSPSSLSASVGDRVTITCRASQGISSALAWYQQKPGKAPKLLIYDASSLESGVPSRFSGSGSGTDFTLTISSLQPEDFATYYCQQFNSYPLTFGGGTKVEIK

SEQ ID NO: 5090 - protein, 242 aa, Artificial Sequence
  MSLN scFv domain
QVQLVESGGGLVKPGGSLRLSCAASGFTFSDYYMSWIRQAPGKGLEWVSYISSSGSTIYYADSVKGRFTISRDNAKNSLYLQMNSLRAEDTAVYYCASVHKKPIFDYWGQGTLVTVSSGGGGSGGGGSGGGGSGGAIQLTQSPSSLSASVGDRVTITCRASQGISSALAWYQQKPGKAPKLLIYDASSLESGVPSRFSGSGSGTDFTLTISSLQPEDFATYYCQQFNSYPLTFGGGTKVEIK

SEQ ID NO: 5091 - protein, 242 aa, Artificial Sequence
  MSLN scFv domain
QVQLVESGGGLVKPGGSLRLSCAASGFTFSDYYMSWIRQAPGKGLEWVSYISSSGSTIYYADSVKGRFTISRDNAKNSLYLQMNSLRAEDTAVYYCASTSRRCTFQHWGQGTLVTVSSGGGGSGGGGSGGGGSGGAIQLTQSPSSLSASVGDRVTITCRASQGISSALAWYQQKPGKAPKLLIYDASSLESGVPSRFSGSGSGTDFTLTISSLQPEDFATYYCQQFNSYPLTFGGGTKVEIK

SEQ ID NO: 5092 - protein, 242 aa, Artificial Sequence
  MSLN scFv domain
QVQLVESGGGLVKPGGSLRLSCAASGFTFSDYYMSWIRQAPGKGLEWVSYISSSGSTIYYADSVKGRFTISRDNAKNSLYLQMNSLRAEDTAVYYCASTSPRPLFQHWGQGTLVTVSSGGGGSGGGGSGGGGSGGAIQLTQSPSSLSASVGDRVTITCRASQGISSALAWYQQKPGKAPKLLIYDASSLESGVPSRFSGSGSGTDFTLTISSLQPEDFATYYCQQFNSYPLTFGGGTKVEIK

SEQ ID NO: 5093 - protein, 244 aa, Artificial Sequence
  MSLN scFv domain
QVQLVESGGGLVKPGGSLRLSCAASGFTFSDYYMSWIRQAPGKGLEWVSYISSSGSTIYYADSVKGRFTISRDNAKNSLYLQMNSLRAEDTAVYYCASPYQVRGVYFDYWGQGTLVTVSSGGGGSGGGGSGGGGSGGAIQLTQSPSSLSASVGDRVTITCRASQGISSALAWYQQKPGKAPKLLIYDASSLESGVPSRFSGSGSGTDFTLTISSLQPEDFATYYCQQFNSYPLTFGGGTKVEIK

SEQ ID NO: 5094 - protein, 244 aa, Artificial Sequence
  MSLN scFv domain
QVQLVESGGGLVKPGGSLRLSCAASGFTFSDYYMSWIRQAPGKGLEWVSYISSSGSTIYYADSVKGRFTISRDNAKNSLYLQMNSLRAEDTAVYYCASPYKKRRTVFDYWGQGTLVTVSSGGGGSGGGGSGGGGSGGAIQLTQSPSSLSASVGDRVTITCRASQGISSALAWYQQKPGKAPKLLIYDASSLESGVPSRFSGSGSGTDFTLTISSLQPEDFATYYCQQFNSYPLTFGGGTKVEIK

SEQ ID NO: 5095 - protein, 243 aa, Artificial Sequence
  MSLN scFv domain
QVQLVESGGGLVKPGGSLRLSCAASGFTFSDYYMSWIRQAPGKGLEWVSYISSSGSTIYYADSVKGRFTISRDNAKNSLYLQMNSLRAEDTAVYYCASLQRGLALFQHWGQGTLVTVSSGGGGSGGGGSGGGGSGGAIQLTQSPSSLSASVGDRVTITCRASQGISSALAWYQQKPGKAPKLLIYDASSLESGVPSRFSGSGSGTDFTLTISSLQPEDFATYYCQQFNSYPLTFGGGTKVEIK

SEQ ID NO: 5096 - protein, 242 aa, Artificial Sequence
  MSLN scFv domain
QVQLVESGGGLVKPGGSLRLSCAASGFTFSDYYMSWIRQAPGKGLEWVSYISSSGSTIYYADSVKGRFTISRDNAKNSLYLQMNSLRAEDTAVYYCASILSVPYFDLWGRGTLVTVSSGGGGSGGGGSGGGGSGGAIQLTQSPSSLSASVGDRVTITCRASQGISSALAWYQQKPGKAPKLLIYDASSLESGVPSRFSGSGSGTDFTLTISSLQPEDFATYYCQQFNSYPLTFGGGTKVEIK

SEQ ID NO: 5097 - protein, 247 aa, Artificial Sequence
  MSLN scFv domain
QVQLVESGGGLVKPGGSLRLSCAASGFTFSDYYMSWIRQAPGKGLEWVSYISSSGSTIYYADSVKGRFTISRDNAKNSLYLQMNSLRAEDTAVYYCASGWIRVPLRLPLFQHWGQGTLVTVSSGGGGSGGGGSGGGGSGGAIQLTQSPSSLSASVGDRVTITCRASQGISSALAWYQQKPGKAPKLLIYDASSLESGVPSRFSGSGSGTDFTLTISSLQPEDFATYYCQQFNSYPLTFGGGTKVEIK

SEQ ID NO: 5098 - protein, 242 aa, Artificial Sequence
  MSLN scFv domain
QVQLVESGGGLVKPGGSLRLSCAASGFTFSDYYMSWIRQAPGKGLEWVSYISSSGSTIYYADSVKGRFTISRDNAKNSLYLQMNSLRAEDTAVYYCARVTIFAIFDIWGQGTMVTVSSGGGGSGGGGSGGGGSGGAIQLTQSPSSLSASVGDRVTITCRASQGISSALAWYQQKPGKAPKLLIYDASSLESGVPSRFSGSGSGTDFTLTISSLQPEDFATYYCQQFNSYPLTFGGGTKVEIK

SEQ ID NO: 5099 - protein, 243 aa, Artificial Sequence
  MSLN scFv domain
QVQLVESGGGLVKPGGSLRLSCAASGFTFSDYYMSWIRQAPGKGLEWVSYISSSGSTIYYADSVKGRFTISRDNAKNSLYLQMNSLRAEDTAVYYCARVGRGFVHFDLWGRGTLVTVSSGGGGSGGGGSGGGGSGGAIQLTQSPSSLSASVGDRVTITCRASQGISSALAWYQQKPGKAPKLLIYDASSLESGVPSRFSGSGSGTDFTLTISSLQPEDFATYYCQQFNSYPLTFGGGTKVEIK

SEQ ID NO: 5100 - protein, 244 aa, Artificial Sequence
  MSLN scFv domain
QVQLVESGGGLVKPGGSLRLSCAASGFTFSDYYMSWIRQAPGKGLEWVSYISSSGSTIYYADSVKGRFTISRDNAKNSLYLQMNSLRAEDTAVYYCARTSRGLCVLFDYWGQGTLVTVSSGGGGSGGGGSGGGGSGGAIQLTQSPSSLSASVGDRVTITCRASQGISSALAWYQQKPGKAPKLLIYDASSLESGVPSRFSGSGSGTDFTLTISSLQPEDFATYYCQQFNSYPLTFGGGTKVEIK

SEQ ID NO: 5101 - protein, 244 aa, Artificial Sequence
  MSLN scFv domain
QVQLVESGGGLVKPGGSLRLSCAASGFTFSDYYMSWIRQAPGKGLEWVSYISSSGSTIYYADSVKGRFTISRDNAKNSLYLQMNSLRAEDTAVYYCARSGPSSYWYFDLWGRGTLVTVSSGGGGSGGGGSGGGGSGGAIQLTQSPSSLSASVGDRVTITCRASQGISSALAWYQQKPGKAPKLLIYDASSLESGVPSRFSGSGSGTDFTLTISSLQPEDFATYYCQQFNSYPLTFGGGTKVEIK

SEQ ID NO: 5102 - protein, 244 aa, Artificial Sequence
  MSLN scFv domain
QVQLVESGGGLVKPGGSLRLSCAASGFTFSDYYMSWIRQAPGKGLEWVSYISSSGSTIYYADSVKGRFTISRDNAKNSLYLQMNSLRAEDTAVYYCARNIYMGGIWFDPWGQGTLVTVSSGGGGSGGGGSGGGGSGGAIQLTQSPSSLSASVGDRVTITCRASQGISSALAWYQQKPGKAPKLLIYDASSLESGVPSRFSGSGSGTDFTLTISSLQPEDFATYYCQQFNSYPLTFGGGTKVEIK

SEQ ID NO: 5103 - protein, 243 aa, Artificial Sequence
  MSLN scFv domain
QVQLVESGGGLVKPGGSLRLSCAASGFTFSDYYMSWIRQAPGKGLEWVSYISSSGSTIYYADSVKGRFTISRDNAKNSLYLQMNSLRAEDTAVYYCARLTVRTGAFDIWGQGTMVTVSSGGGGSGGGGSGGGGSGGAIQLTQSPSSLSASVGDRVTITCRASQGISSALAWYQQKPGKAPKLLIYDASSLESGVPSRFSGSGSGTDFTLTISSLQPEDFATYYCQQFNSYPLTFGGGTKVEIK

SEQ ID NO: 5104 - protein, 243 aa, Artificial Sequence
  MSLN scFv domain
QVQLVESGGGLVKPGGSLRLSCAASGFTFSDYYMSWIRQAPGKGLEWVSYISSSGSTIYYADSVKGRFTISRDNAKNSLYLQMNSLRAEDTAVYYCARLRTAHLDFDLWGRGTLVTVSSGGGGSGGGGSGGGGSGGAIQLTQSPSSLSASVGDRVTITCRASQGISSALAWYQQKPGKAPKLLIYDASSLESGVPSRFSGSGSGTDFTLTISSLQPEDFATYYCQQFNSYPLTFGGGTKVEIK

SEQ ID NO: 5105 - protein, 243 aa, Artificial Sequence
  MSLN scFv domain
QVQLVESGGGLVKPGGSLRLSCAASGFTFSDYYMSWIRQAPGKGLEWVSYISSSGSTIYYADSVKGRFTISRDNAKNSLYLQMNSLRAEDTAVYYCARDLIFPVVFDYWGQGTLVTVSSGGGGSGGGGSGGGGSGGAIQLTQSPSSLSASVGDRVTITCRASQGISSALAWYQQKPGKAPKLLIYDASSLESGVPSRFSGSGSGTDFTLTISSLQPEDFATYYCQQFNSYPLTFGGGTKVEIK

SEQ ID NO: 5106 - protein, 246 aa, Artificial Sequence
  MSLN scFv domain
QVQLVESGGGLVKPGGSLRLSCAASGFTFSDYYMSWIRQAPGKGLEWVSYISSSGSTIYYADSVKGRFTISRDNAKNSLYLQMNSLRAEDTAVYYCARDGYRKYGYVFFDIWGQGTMVTVSSGGGGSGGGGSGGGGSGGAIQLTQSPSSLSASVGDRVTITCRASQGISSALAWYQQKPGKAPKLLIYDASSLESGVPSRFSGSGSGTDFTLTISSLQPEDFATYYCQQFNSYPLTFGGGTKVEIK

SEQ ID NO: 5107 - protein, 246 aa, Artificial Sequence
  MSLN scFv domain
QVQLVESGGGLVKPGGSLRLSCAASGFTFSDYYMSWIRQAPGKGLEWVSYISSSGSTIYYADSVKGRFTISRDNAKNSLYLQMNSLRAEDTAVYYCARDGRYRRFWHAFDIWGQGTMVTVSSGGGGSGGGGSGGGGSGGAIQLTQSPSSLSASVGDRVTITCRASQGISSALAWYQQKPGKAPKLLIYDASSLESGVPSRFSGSGSGTDFTLTISSLQPEDFATYYCQQFNSYPLTFGGGTKVEIK

SEQ ID NO: 5108 - protein, 242 aa, Artificial Sequence
  MSLN scFv domain
QVQLVESGGGLVKPGGSLRLSCAASGFTFSDYYMSWIRQAPGKGLEWVSYISSSGSTIYYADSVKGRFTISRDNAKNSLYLQMNSLRAEDTAVYYCARAHIRGYFDLWGRGTLVTVSSGGGGSGGGGSGGGGSGGAIQLTQSPSSLSASVGDRVTITCRASQGISSALAWYQQKPGKAPKLLIYDASSLESGVPSRFSGSGSGTDFTLTISSLQPEDFATYYCQQFNSYPLTFGGGTKVEIK

SEQ ID NO: 5109 - protein, 245 aa, Artificial Sequence
  MSLN scFv domain
EVQLLESGGGLVQPGGSLRLSCAASGFTFSSYAMSWVRQAPGKGLEWVSAISGSGGSTYYADSVKGRFTISRDNSKNTLYLQMNSLRAEDTAVYYCATWMGGGGRWYFDLWGRGTLVTVSSGGGGSGGGGSGGGGSGGAIQLTQSPSSLSASVGDRVTITCRASQGISSALAWYQQKPGKAPKLLIYDASSLESGVPSRFSGSGSGTDFTLTISSLQPEDFATYYCQQFNNYPLTFGGGTKVEIK

SEQ ID NO: 5110 - protein, 243 aa, Artificial Sequence
  MSLN scFv domain
EVQLLESGGGLVQPGGSLRLSCAASGFTFSSYAMSWVRQAPGKGLEWVSAISGSGGSTYYADSVKGRFTISRDNSKNTLYLQMNSLRAEDTAVYYCARTSRTTWYFDLWGRGTLVTVSSGGGGSGGGGSGGGGSGGAIQLTQSPSSLSASVGDRVTITCRASQGISSALAWYQQKPGKAPKLLIYDASSLESGVPSRFSGSGSGTDFTLTISSLQPEDFATYYCQQFNNYPLTFGGGTKVEIK

SEQ ID NO: 5111 - protein, 245 aa, Artificial Sequence
  MSLN scFv domain
EVQLLESGGGLVQPGGSLRLSCAASGFTFSSYAMSWVRQAPGKGLEWVSAISGSGGSTYYADSVKGRFTISRDNSKNTLYLQMNSLRAEDTAVYYCAKWMGGGGRLYFDLWGRGTLVTVSSGGGGSGGGGSGGGGSGGAIQLTQSPSSLSASVGDRVTITCRASQGISSALAWYQQKPGKAPKLLIYDASSLESGVPSRFSGSGSGTDFTLTISSLQPEDFATYYCQQFNNYPLTFGGGTKVEIK

SEQ ID NO: 5112 - protein, 244 aa, Artificial Sequence
  MSLN scFv domain
EVQLLESGGGLVQPGGSLRLSCAASGFTFSSYAMSWVRQAPGKGLEWVSAISGSGGSTYYADSVKGRFTISRDNSKNTLYLQMNSLRAEDTAVYYCAKWGGRLYWYFDLWGRGTLVTVSSGGGGSGGGGSGGGGSGGAIQLTQSPSSLSASVGDRVTITCRASQGISSALAWYQQKPGKAPKLLIYDASSLESGVPSRFSGSGSGTDFTLTISSLQPEDFATYYCQQFNNYPLTFGGGTKVEIK

SEQ ID NO: 5113 - protein, 243 aa, Artificial Sequence
  MSLN scFv domain
EVQLLESGGGLVQPGGSLRLSCAASGFTFSSYAMSWVRQAPGKGLEWVSAISGSGGSTYYADSVKGRFTISRDNSKNTLYLQMNSLRAEDTAVYYCAKVIRQLWYFDLWGRGTLVTVSSGGGGSGGGGSGGGGSGGAIQLTQSPSSLSASVGDRVTITCRASQGISSALAWYQQKPGKAPKLLIYDASSLESGVPSRFSGSGSGTDFTLTISSLQPEDFATYYCQQFNNYPLTFGGGTKVEIK

SEQ ID NO: 5114 - protein, 243 aa, Artificial Sequence
  MSLN scFv domain
EVQLLESGGGLVQPGGSLRLSCAASGFTFSSYAMSWVRQAPGKGLEWVSAISGSGGSTYYADSVKGRFTISRDNSKNTLYLQMNSLRAEDTAVYYCAKVFANSWYFDLWGRGTLVTVSSGGGGSGGGGSGGGGSGGAIQLTQSPSSLSASVGDRVTITCRASQGISSALAWYQQKPGKAPKLLIYDASSLESGVPSRFSGSGSGTDFTLTISSLQPEDFATYYCQQFNNYPLTFGGGTKVEIK

SEQ ID NO: 5115 - protein, 243 aa, Artificial Sequence
  MSLN scFv domain
EVQLLESGGGLVQPGGSLRLSCAASGFTFSSYAMSWVRQAPGKGLEWVSAISGSGGSTYYADSVKGRFTISRDNSKNTLYLQMNSLRAEDTAVYYCAKVDRTTWYFDLWGRGTLVTVSSGGGGSGGGGSGGGGSGGAIQLTQSPSSLSASVGDRVTITCRASQGISSALAWYQQKPGKAPKLLIYDASSLESGVPSRFSGSGSGTDFTLTISSLQPEDFATYYCQQFNNYPLTFGGGTKVEIK

SEQ ID NO: 5116 - protein, 246 aa, Artificial Sequence
  MSLN scFv domain
EVQLLESGGGLVQPGGSLRLSCAASGFTFSSYAMSWVRQAPGKGLEWVSAISGSGGSTYYADSVKGRFTISRDNSKNTLYLQMNSLRAEDTAVYYCAKRWGKDGPYWYFDLWGRGTLVTVSSGGGGSGGGGSGGGGSGGAIQLTQSPSSLSASVGDRVTITCRASQGISSALAWYQQKPGKAPKLLIYDASSLESGVPSRFSGSGSGTDFTLTISSLQPEDFATYYCQQFNNYPLTFGGGTKVEIK

SEQ ID NO: 5117 - protein, 246 aa, Artificial Sequence
  MSLN scFv domain
EVQLLESGGGLVQPGGSLRLSCAASGFTFSSYAMSWVRQAPGKGLEWVSAISGSGGSTYYADSVKGRFTISRDNSKNTLYLQMNSLRAEDTAVYYCAKRRDSYGPYWYFDLWGRGTLVTVSSGGGGSGGGGSGGGGSGGAIQLTQSPSSLSASVGDRVTITCRASQGISSALAWYQQKPGKAPKLLIYDASSLESGVPSRFSGSGSGTDFTLTISSLQPEDFATYYCQQFNNYPLTFGGGTKVEIK

SEQ ID NO: 5118 - protein, 245 aa, Artificial Sequence
  MSLN scFv domain
EVQLLESGGGLVQPGGSLRLSCAASGFTFSSYAMSWVRQAPGKGLEWVSAISGSGGSTYYADSVKGRFTISRDNSKNTLYLQMNSLRAEDTAVYYCAKNRPPPGYWYFDLWGRGTLVTVSSGGGGSGGGGSGGGGSGGAIQLTQSPSSLSASVGDRVTITCRASQGISSALAWYQQKPGKAPKLLIYDASSLESGVPSRFSGSGSGTDFTLTISSLQPEDFATYYCQQFNNYPLTFGGGTKVEIK

SEQ ID NO: 5119 - protein, 243 aa, Artificial Sequence
  MSLN scFv domain
EVQLLESGGGLVQPGGSLRLSCAASGFTFSSYAMSWVRQAPGKGLEWVSAISGSGGSTYYADSVKGRFTISRDNSKNTLYLQMNSLRAEDTAVYYCAKGRRFSWYFDLWGRGTLVTVSSGGGGSGGGGSGGGGSGGAIQLTQSPSSLSASVGDRVTITCRASQGISSALAWYQQKPGKAPKLLIYDASSLESGVPSRFSGSGSGTDFTLTISSLQPEDFATYYCQQFNNYPLTFGGGTKVEIK

SEQ ID NO: 5120 - protein, 5 aa, Artificial Sequence
  MSLN scFv domain HC CDR1
NAWMS

SEQ ID NO: 5121 - protein, 5 aa, Artificial Sequence
  MSLN scFv domain HC CDR1
SYAMH

SEQ ID NO: 5122 - protein, 7 aa, Artificial Sequence
  MSLN scFv domain HC CDR1
SGGYSWS

SEQ ID NO: 5123 - protein, 7 aa, Artificial Sequence
  MSLN scFv domain HC CDR1
SGGYYWS

SEQ ID NO: 5124 - protein, 7 aa, Artificial Sequence
  MSLN scFv domain HC CDR1
SSSYYWG

SEQ ID NO: 5125 - protein, 5 aa, Artificial Sequence
  MSLN scFv domain HC CDR1
SYSMN

SEQ ID NO: 5126 - protein, 5 aa, Artificial Sequence
  MSLN scFv domain HC CDR1
SYYWS

SEQ ID NO: 5127 - protein, 5 aa, Artificial Sequence
  MSLN scFv domain HC CDR1
DYGMS

SEQ ID NO: 5128 - protein, 5 aa, Artificial Sequence
  MSLN scFv domain HC CDR1
SYDIN

SEQ ID NO: 5129 - protein, 7 aa, Artificial Sequence
  MSLN scFv domain HC CDR1
SGDYYWS

SEQ ID NO: 5130 - protein, 5 aa, Artificial Sequence
  MSLN scFv domain HC CDR1
DYYMS

SEQ ID NO: 5131 - protein, 6 aa, Artificial Sequence
  MSLN scFv domain HC CDR1
SSNWWS

SEQ ID NO: 5132 - protein, 5 aa, Artificial Sequence
  MSLN scFv domain HC CDR1
SYGIS

SEQ ID NO: 5133 - protein, 5 aa, Artificial Sequence
  MSLN scFv domain HC CDR1
SNYMS

SEQ ID NO: 5134 - protein, 5 aa, Artificial Sequence
  MSLN scFv domain HC CDR1
SYGMH

SEQ ID NO: 5135 - protein, 5 aa, Artificial Sequence
  MSLN scFv domain HC CDR1
DYTMH

SEQ ID NO: 5136 - protein, 5 aa, Artificial Sequence
  MSLN scFv domain HC CDR1
SYAMN

SEQ ID NO: 5137 - protein, 7 aa, Artificial Sequence
  MSLN scFv domain HC CDR1
SGSYYWS

SEQ ID NO: 5138 - protein, 5 aa, Artificial Sequence
  MSLN scFv domain HC CDR1
SYAMS

SEQ ID NO: 5139 - protein, 5 aa, Artificial Sequence
  MSLN scFv domain HC CDR1
GYTMN

SEQ ID NO: 5140 - protein, 5 aa, Artificial Sequence
  MSLN scFv domain HC CDR1
SYWMH

SEQ ID NO: 5141 - protein, 19 aa, Artificial Sequence
  MSLN scFv domain HC CDR2
RIKSKTDGGTTDYAAPVKG

SEQ ID NO: 5142 - protein, 17 aa, Artificial Sequence
  MSLN scFv domain HC CDR2
AISSNGGSTYYANSVKG

SEQ ID NO: 5143 - protein, 16 aa, Artificial Sequence
  MSLN scFv domain HC CDR2
YIYHSGSTYYNPSLKS

SEQ ID NO: 5144 - protein, 17 aa, Artificial Sequence
  MSLN scFv domain HC CDR2
RINSDGSSTSYADSVKG

SEQ ID NO: 5145 - protein, 16 aa, Artificial Sequence
  MSLN scFv domain HC CDR2
YIYYSGSTYYNPSLKS

SEQ ID NO: 5146 - protein, 16 aa, Artificial Sequence
  MSLN scFv domain HC CDR2
SIYYSGSTYYNPSLKS

SEQ ID NO: 5147 - protein, 17 aa, Artificial Sequence
  MSLN scFv domain HC CDR2
YISSSSSTIYYADSVKG

SEQ ID NO: 5148 - protein, 17 aa, Artificial Sequence
  MSLN scFv domain HC CDR2
SISSSSSYIYYADSVKG

SEQ ID NO: 5149 - protein, 17 aa, Artificial Sequence
  MSLN scFv domain HC CDR2
WINAGNGNTKYSQKFQG

SEQ ID NO: 5150 - protein, 16 aa, Artificial Sequence
  MSLN scFv domain HC CDR2
YIYYSGSTNYNPSLKS

SEQ ID NO: 5151 - protein, 17 aa, Artificial Sequence
  MSLN scFv domain HC CDR2
GINWNGGSTGYADSVKG

SEQ ID NO: 5152 - protein, 17 aa, Artificial Sequence
  MSLN scFv domain HC CDR2
WMNPNSGNTGYAQKFQG

SEQ ID NO: 5153 - protein, 17 aa, Artificial Sequence
  MSLN scFv domain HC CDR2
YISSSGSTIYYADSVKG

SEQ ID NO: 5154 - protein, 16 aa, Artificial Sequence
  MSLN scFv domain HC CDR2
EIYHSGSTNYNPSLKS

SEQ ID NO: 5155 - protein, 17 aa, Artificial Sequence
  MSLN scFv domain HC CDR2
WISAYNGNTNYAQKLQG

SEQ ID NO: 5156 - protein, 16 aa, Artificial Sequence
  MSLN scFv domain HC CDR2
VIYSGGSTYYADSVKG

SEQ ID NO: 5157 - protein, 17 aa, Artificial Sequence
  MSLN scFv domain HC CDR2
VIWYDGSNKYYADSVKG

SEQ ID NO: 5158 - protein, 17 aa, Artificial Sequence
  MSLN scFv domain HC CDR2
LISWDGGSTYYADSVKG

SEQ ID NO: 5159 - protein, 17 aa, Artificial Sequence
  MSLN scFv domain HC CDR2
WINTNTGNPTYAQGFTG

SEQ ID NO: 5160 - protein, 17 aa, Artificial Sequence
  MSLN scFv domain HC CDR2
AISGSGGSTYYADSVKG

SEQ ID NO: 5161 - protein, 17 aa, Artificial Sequence
  MSLN scFv domain HC CDR2
LITPYNGASSYNQKFRG

SEQ ID NO: 5162 - protein, 10 aa, Artificial Sequence
  MSLN scFv domain HC CDR3
DLPKLRNFHI

SEQ ID NO: 5163 - protein, 15 aa, Artificial Sequence
  MSLN scFv domain HC CDR3
LEYHGFRQYGLRYWH

SEQ ID NO: 5164 - protein, 13 aa, Artificial Sequence
  MSLN scFv domain HC CDR3
IKFWFAGINYFFP

SEQ ID NO: 5165 - protein, 10 aa, Artificial Sequence
  MSLN scFv domain HC CDR3
GFLGMGSNFI

SEQ ID NO: 5166 - protein, 9 aa, Artificial Sequence
  MSLN scFv domain HC CDR3
GDRARYFDL

SEQ ID NO: 5167 - protein, 14 aa, Artificial Sequence
  MSLN scFv domain HC CDR3
YPRGYHQMVDAFDI

SEQ ID NO: 5168 - protein, 16 aa, Artificial Sequence
  MSLN scFv domain HC CDR3
VRFLAARTTIPEANFL

SEQ ID NO: 5169 - protein, 9 aa, Artificial Sequence
  MSLN scFv domain HC CDR3
VLSRARFDY

SEQ ID NO: 5170 - protein, 8 aa, Artificial Sequence
  MSLN scFv domain HC CDR3
LRGRVFDP

SEQ ID NO: 5171 - protein, 13 aa, Artificial Sequence
  MSLN scFv domain HC CDR3
IKFTSFLYVHGFL

SEQ ID NO: 5172 - protein, 13 aa, Artificial Sequence
  MSLN scFv domain HC CDR3
GQRWLYLGGIRRH

SEQ ID NO: 5173 - protein, 12 aa, Artificial Sequence
  MSLN scFv domain HC CDR3
EWIPSRPYYFDY

SEQ ID NO: 5174 - protein, 10 aa, Artificial Sequence
  MSLN scFv domain HC CDR3
ESTGTGAFDI

SEQ ID NO: 5175 - protein, 13 aa, Artificial Sequence
  MSLN scFv domain HC CDR3
ERYRRVLHWYFDL

SEQ ID NO: 5176 - protein, 7 aa, Artificial Sequence
  MSLN scFv domain HC CDR3
EPDAFDI

SEQ ID NO: 5177 - protein, 12 aa, Artificial Sequence
  MSLN scFv domain HC CDR3
EHMGTIPYYFDY

SEQ ID NO: 5178 - protein, 10 aa, Artificial Sequence
  MSLN scFv domain HC CDR3
EEFGYGDVLY

SEQ ID NO: 5179 - protein, 10 aa, Artificial Sequence
  MSLN scFv domain HC CDR3
EDVVKGAFDI

SEQ ID NO: 5180 - protein, 12 aa, Artificial Sequence
  MSLN scFv domain HC CDR3
EDFSHKLGYFQH

SEQ ID NO: 5181 - protein, 5 aa, Artificial Sequence
  MSLN scFv domain HC CDR3
DYDYV

SEQ ID NO: 5182 - protein, 10 aa, Artificial Sequence
  MSLN scFv domain HC CDR3
DRRDWDWFDP

SEQ ID NO: 5183 - protein, 10 aa, Artificial Sequence
  MSLN scFv domain HC CDR3
DQQALKYRVD

SEQ ID NO: 5184 - protein, 9 aa, Artificial Sequence
  MSLN scFv domain HC CDR3
DLTLGCFDY

SEQ ID NO: 5185 - protein, 10 aa, Artificial Sequence
  MSLN scFv domain HC CDR3
DGSNSWYFDL

SEQ ID NO: 5186 - protein, 9 aa, Artificial Sequence
  cDR-L1
AFLFLSFSV

SEQ ID NO: 5187 - protein, 12 aa, Artificial Sequence
  MSLN scFv domain HC CDR3
GIFYSSKEDFDY

SEQ ID NO: 5188 - protein, 15 aa, Artificial Sequence
  MSLN scFv domain HC CDR3
DIWIFYSSNPKPTVY

SEQ ID NO: 5189 - protein, 13 aa, Artificial Sequence
  MSLN scFv domain HC CDR3
KDQTLTYGNWFDP

SEQ ID NO: 5190 - protein, 8 aa, Artificial Sequence
  MSLN scFv domain HC CDR3
DHYERGLY

SEQ ID NO: 5191 - protein, 9 aa, Artificial Sequence
  MSLN scFv domain HC CDR3
YMYNWYFDL

SEQ ID NO: 5192 - protein, 8 aa, Artificial Sequence
  MSLN scFv domain HC CDR3
DRRPAFDI

SEQ ID NO: 5193 - protein, 10 aa, Artificial Sequence
  MSLN scFv domain HC CDR3
HLKRRPYFDY

SEQ ID NO: 5194 - protein, 9 aa, Artificial Sequence
  MSLN scFv domain HC CDR3
VHKKPIFDY

SEQ ID NO: 5195 - protein, 9 aa, Artificial Sequence
  MSLN scFv domain HC CDR3
TSRRCTFQH

SEQ ID NO: 5196 - protein, 9 aa, Artificial Sequence
  MSLN scFv domain HC CDR3
TSPRPLFQH

SEQ ID NO: 5197 - protein, 11 aa, Artificial Sequence
  MSLN scFv domain HC CDR3
PYQVRGVYFDY

SEQ ID NO: 5198 - protein, 11 aa, Artificial Sequence
  MSLN scFv domain HC CDR3
PYKKRRTVFDY

SEQ ID NO: 5199 - protein, 10 aa, Artificial Sequence
  MSLN scFv domain HC CDR3
LQRGLALFQH

SEQ ID NO: 5200 - protein, 9 aa, Artificial Sequence
  MSLN scFv domain HC CDR3
ILSVPYFDL

SEQ ID NO: 5201 - protein, 14 aa, Artificial Sequence
  MSLN scFv domain HC CDR3
GWIRVPLRLPLFQH

SEQ ID NO: 5202 - protein, 9 aa, Artificial Sequence
  MSLN scFv domain HC CDR3
VTIFAIFDI

SEQ ID NO: 5203 - protein, 10 aa, Artificial Sequence
  MSLN scFv domain HC CDR3
VGRGFVHFDL

SEQ ID NO: 5204 - protein, 11 aa, Artificial Sequence
  MSLN scFv domain HC CDR3
TSRGLCVLFDY

SEQ ID NO: 5205 - protein, 11 aa, Artificial Sequence
  MSLN scFv domain HC CDR3
SGPSSYWYFDL

SEQ ID NO: 5206 - protein, 11 aa, Artificial Sequence
  MSLN scFv domain HC CDR3
NIYMGGIWFDP

SEQ ID NO: 5207 - protein, 10 aa, Artificial Sequence
  MSLN scFv domain HC CDR3
LTVRTGAFDI

SEQ ID NO: 5208 - protein, 10 aa, Artificial Sequence
  MSLN scFv domain HC CDR3
LRTAHLDFDL

SEQ ID NO: 5209 - protein, 10 aa, Artificial Sequence
  MSLN scFv domain HC CDR3
DLIFPVVFDY

SEQ ID NO: 5210 - protein, 13 aa, Artificial Sequence
  MSLN scFv domain HC CDR3
DGYRKYGYVFFDI

SEQ ID NO: 5211 - protein, 13 aa, Artificial Sequence
  MSLN scFv domain HC CDR3
DGRYRRFWHAFDI

SEQ ID NO: 5212 - protein, 9 aa, Artificial Sequence
  MSLN scFv domain HC CDR3
AHIRGYFDL

SEQ ID NO: 5213 - protein, 12 aa, Artificial Sequence
  MSLN scFv domain HC CDR3
WMGGGGRWYFDL

SEQ ID NO: 5214 - protein, 10 aa, Artificial Sequence
  MSLN scFv domain HC CDR3
TSRTTWYFDL

SEQ ID NO: 5215 - protein, 12 aa, Artificial Sequence
  MSLN scFv domain HC CDR3
WMGGGGRLYFDL

SEQ ID NO: 5216 - protein, 11 aa, Artificial Sequence
  MSLN scFv domain HC CDR3
WGGRLYWYFDL

SEQ ID NO: 5217 - protein, 10 aa, Artificial Sequence
  MSLN scFv domain HC CDR3
VIRQLWYFDL

SEQ ID NO: 5218 - protein, 10 aa, Artificial Sequence
  MSLN scFv domain HC CDR3
VFANSWYFDL

SEQ ID NO: 5219 - protein, 10 aa, Artificial Sequence
  MSLN scFv domain HC CDR3
VDRTTWYFDL

SEQ ID NO: 5220 - protein, 13 aa, Artificial Sequence
  MSLN scFv domain HC CDR3
RWGKDGPYWYFDL

SEQ ID NO: 5221 - protein, 13 aa, Artificial Sequence
  MSLN scFv domain HC CDR3
RRDSYGPYWYFDL

SEQ ID NO: 5222 - protein, 12 aa, Artificial Sequence
  MSLN scFv domain HC CDR3
NRPPPGYWYFDL

SEQ ID NO: 5223 - protein, 10 aa, Artificial Sequence
  MSLN scFv domain HC CDR3
GRRFSWYFDL

SEQ ID NO: 5224 - protein, 14 aa, Artificial Sequence
  MSLN scFv domain HC CDR3
CAREDVVKGAFDIW

SEQ ID NO: 5225 - protein, 10 aa, Artificial Sequence
  MSLN scFv domain HC CDR3
GGYDGRGFDY

SEQ ID NO: 5226 - protein, 11 aa, Artificial Sequence
  LC CDR1
RASQSISSYLN

SEQ ID NO: 5227 - protein, 14 aa, Artificial Sequence
  CDR-L1
TGTSSDVGGYNYVS

SEQ ID NO: 5228 - protein, 11 aa, Artificial Sequence
  MSLN scFv domain LC CDR1
RASQGISSWLA

SEQ ID NO: 5229 - protein, 11 aa, Artificial Sequence
  MSLN scFv domain LC CDR1
RASQGISSALA

SEQ ID NO: 5230 - protein, 10 aa, Artificial Sequence
  MSLN scFv domain LC CDR1
SASSSVSYMH

SEQ ID NO: 5231 - protein, 7 aa, Artificial Sequence
  MSLN scFv domain LC CDR2
AASSLQS

SEQ ID NO: 5232 - protein, 7 aa, Artificial Sequence
  MSLN scFv domain LC CDR2
DTSKLAS

SEQ ID NO: 5233 - protein, 9 aa, Artificial Sequence
  MSLN scFv domain LC CDR3
QQSYSTPLT

SEQ ID NO: 5234 - protein, 9 aa, Artificial Sequence
  MSLN scFv domain LC CDR3
QQANSFPLT

SEQ ID NO: 5235 - protein, 9 aa, Artificial Sequence
  MSLN scFv domain LC CDR3
QQWSGYPLT

SEQ ID NO: 5236 - protein, 248 aa, Artificial Sequence
  HLA-A01 scFv A1-9
QVQLVQSGAEVKKPGASVKVSCKASGYTFTSYGISWVRQAPGQGLEWMGWISAYNGNTNYAQKLQGRVTMTTDTSTSTAYMELRSLRSDDTAVYYCARGGWTAWYYYMDVWGKGTTVTVSSGGGGSGGGGSGGGGSGGQTVVTQEPSLTVSPGGTVTLTCASSTGAVTSGYYPNWFQQKPGQAPRALIYSTSNKHSWTPARFSGSLLGGKAALTLSGVQPEDEAEYYCLLYYGGAQWVFGGGTKLTVL

SEQ ID NO: 5237 - protein, 244 aa, Artificial Sequence
  HLA-A01 scFv A1-8
EVQLVESGGGLVQPGGSLRLSCAASGFTFSSYSMNWVRQAPGKGLEWVSYISSSSSTIYYADSVKGRFTISRDNAKNSLYLQMNSLRAEDTAVYYCARAKYYYMDVWGKGTTVTVSSGGGGSGGGGSGGGGSGGQSVLTQPPSASGTPGQRVTISCSGSSSNIGSNTVNWYQQLPGTAPKLLIYSNNQRPSGVPDRFSGSKSGTSASLAISGLQSEDEADYYCAAWDDSLNGWVFGGGTKLTVL

SEQ ID NO: 5238 - protein, 248 aa, Artificial Sequence
  HLA-A01 scFv A1-7
QVQLQESGPGLVKPSQTLSLTCTVSGGSISSGGYYWSWIRQPPGKGLEWIGYIYYSGSTYYNPSLKSRVTISVDTSKNQFSLKLSSVTAADTAVYYCARDQVDKNTYYYYMDVWGKGTTVTVSSGGGGSGGGGSGGGGSGGDIQMTQSPSSLSASVGDRVTITCRASQSISSYLNWYQQKPGKAPKLLIYAASSLQSGVPSRFSGSGSGTDFTLTISSLQPEDFATYYCQQSYSTPLTFGGGTKVEIK

SEQ ID NO: 5239 - protein, 243 aa, Artificial Sequence
  HLA-A01 scFv A1-6
QVQLVESGGGLVKPGGSLRLSCAASGFTFSDYYMSWIRQAPGKGLEWVSYISSSGSTIYYADSVKGRFTISRDNAKNSLYLQMNSLRAEDTAVYYCARACQLAEYFQHWGQGTLVTVSSGGGGSGGGGSGGGGSGGDIQMTQSPSSVSASVGDRVTITCRASQGISSWLAWYQQKPGKAPKLLIYAASSLQSGVPSRFSGSGSGTDFTLTISSLQPEDFATYYCQQANSFPLTFGGGTKVEIK

SEQ ID NO: 5240 - protein, 248 aa, Artificial Sequence
  HLA-A01 scFv A1-5
QVQLQESGPGLVKPSQTLSLTCTVSGGSISSGGYYWSWIRQPPGKGLEWIGYIYYSGSTYYNPSLKSRVTISVDTSKNQFSLKLSSVTAADTAVYYCARDRVDKNTSYYYMDVWGKGTTVTVSSGGGGSGGGGSGGGGSGGDIQMTQSPSSLSASVGDRVTITCRASQSISSYLNWYQQKPGKAPKLLIYAASSLQSGVPSRFSGSGSGTDFTLTISSLQPEDFATYYCQQSYSTPLTFGGGTKVEIK

SEQ ID NO: 5241 - protein, 245 aa, Artificial Sequence
  HLA-A01 scFv A1-4
QVQLQESGPGLVKPSDTLSLTCAVSGYSISSSNWWGWIRQPPGKGLEWIGYIYYSGSTYYNPSLKSRVTMSVDTSKNQFSLKLSSVTAVDTAVYYCARRVQLKLVHWFDPWGQGTLVTVSSGGGGSGGGGSGGGGSGGDIQMTQSPSSLSASVGDRVTITCRASQSISSYLNWYQQKPGKAPKLLIYAASSLQSGVPSRFSGSGSGTDFTLTISSLQPEDFATYYCQQSYSTPLTFGGGTKVEIK

SEQ ID NO: 5242 - protein, 245 aa, Artificial Sequence
  HLA-A01 scFv A1-3
QVQLVQSGAEVKKPGASVKVSCKASGYTFTSYDINWVRQATGQGLEWMGWMNPNSGNTGYAQKFQGRVTMTRNTSISTAYMELSSLRSEDTAVYYCATYYDYVTVFYFQHWGQGTLVTVSSGGGGSGGGGSGGGGSGGDIQMTQSPSSLSASVGDRVTITCRASQSISSYLNWYQQKPGKAPKLLIYAASSLQSGVPSRFSGSGSGTDFTLTISSLQPEDFATYYCQQSYSTPLTFGGGTKVEIK

SEQ ID NO: 5243 - protein, 245 aa, Artificial Sequence
  HLA-A01 scFv A1-2
QLQLQESGSGLVKPSQTLSLTCAVSGGSISSGGYSWSWIRQPPGKGLEWIGYIYHSGSTYYNPSLKSRVTISVDRSKNQFSLKLSSVTAADTAVYYCARESYPSFYAFDIWGQGTMVTVSSGGGGSGGGGSGGGGSGGDIQMTQSPSSLSASVGDRVTITCRASQSISSYLNWYQQKPGKAPKLLIYAASSLQSGVPSRFSGSGSGTDFTLTISSLQPEDFATYYCQQSYSTPLTFGGGTKVEIK

SEQ ID NO: 5244 - protein, 249 aa, Artificial Sequence
  HLA-A01 scFv A1-1
QITLKESGPTLVKPTQTLTLTCTFSGFSLSTSGVGVGWIRQPPGKALEWLALIYWNDDKRYSPSLKSRLTITKDTSKNQVVLTMTNMDPVDTATYYCAHSNMWSYSLNDYYFDYWGQGTLVTVSSGGGGSGGGGSGGGGSGGDIQMTQSPSSLSASVGDRVTITCRASQSISSYLNWYQQKPGKAPKLLIYAASSLQSGVPSRFSGSGSGTDFTLTISSLQPEDFATYYCQQSYSTPLTFGGGTKVEIK

SEQ ID NO: 5245 - protein, 6 aa, Artificial Sequence
  CDR-H1
SSNWWG

SEQ ID NO: 5246 - protein, 7 aa, Artificial Sequence
  CDR-L2
SNNQRPS

SEQ ID NO: 5247 - protein, 12 aa, Artificial Sequence
  CDR-H3
GGWTAWYYYMDV

SEQ ID NO: 5248 - protein, 8 aa, Artificial Sequence
  CDR-H3
AKYYYMDV

SEQ ID NO: 5249 - protein, 14 aa, Artificial Sequence
  CDR-H3
DQVDKNTYYYYMDV

SEQ ID NO: 5250 - protein, 10 aa, Artificial Sequence
  CDR-H3
ACQLAEYFQH

SEQ ID NO: 5251 - protein, 14 aa, Artificial Sequence
  CDR-H3
DRVDKNTSYYYMDV

SEQ ID NO: 5252 - protein, 12 aa, Artificial Sequence
  CDR-H3
RVQLKLVHWFDP

SEQ ID NO: 5253 - protein, 12 aa, Artificial Sequence
  CDR-H3
YYDYVTVFYFQH

SEQ ID NO: 5254 - protein, 11 aa, Artificial Sequence
  CDR-H3
ESYPSFYAFDI

SEQ ID NO: 5255 - protein, 15 aa, Artificial Sequence
  CDR-H3
SNMWSYSLNDYYFDY

SEQ ID NO: 5256 - protein, 14 aa, Artificial Sequence
  CDR-L1
ASSTGAVTSGYYPN

SEQ ID NO: 5257 - protein, 13 aa, Artificial Sequence
  CDR-L1
SGSSSNIGSNTVN

SEQ ID NO: 5258 - protein, 7 aa, Artificial Sequence
  CDR-L2
STSNKHS

SEQ ID NO: 5259 - protein, 10 aa, Artificial Sequence
  CDR-L3
LLYYGGAQWV

SEQ ID NO: 5260 - protein, 11 aa, Artificial Sequence
  CDR-L3
AAWDDSLNGWV

SEQ ID NO: 5261 - protein, 244 aa, Artificial Sequence
  HLA-A03 scFv 15
QVQLVQSGAEVKKPGASVKVSCKASGYTFTSYGISWVRQAPGQGLEWMGWISAYNGNTNYAQKLQGRVTMTTDTSTSTAYMELRSLRSDDTAVYYCARERVSQRGAFDIWGQGTMVTVSSGGGGSGGGGSGGGGSGGDIQMTQSPSSLSASVGDRVTITCRASQSISSYLNWYQQKPGKAPKLLIYAASSLQSGVPSRFSGSGSGTDFTLTISSLQPEDFATYYCQQSYSTPLTFGGGTKVEIK

SEQ ID NO: 5262 - protein, 243 aa, Artificial Sequence
  HLA-A03 scFv 16
EVQLVESGGGLVQPGGSLRLSCAASGFTFSSYSMNWVRQAPGKGLEWVSYISSSSSTIYYADSVKGRFTISRDNAKNSLYLQMNSLRAEDTAVYYCARGNPDKDPFDYWGQGTLVTVSSGGGGSGGGGSGGGGSGGDIQMTQSPSSLSASVGDRVTITCRASQSISSYLNWYQQKPGKAPKLLIYAASSLQSGVPSRFSGSGSGTDFTLTISSLQPEDFATYYCQQSYSTPLTFGGGTKVEIK

SEQ ID NO: 5263 - protein, 245 aa, Artificial Sequence
  HLA-A03 scFv 17
QVQLQESGPGLVKPSETLSLTCTVSGGSVSSGSYYWSWIRQPPGKGLEWIGYIYYSGSTNYNPSLKSRVTISVDTSKNQFSLKLSSVTAADTAVYYCARDFYCTNWYFDLWGRGTLVTVSSGGGGSGGGGSGGGGSGGDIQMTQSPSSLSASVGDRVTITCRASQSISSYLNWYQQKPGKAPKLLIYAASSLQSGVPSRFSGSGSGTDFTLTISSLQPEDFATYYCQQSYSTPLTFGGGTKVEIK

SEQ ID NO: 5264 - protein, 244 aa, Artificial Sequence
  HLA-A*03 scFv 18
QVQLQESGPGLVKPSETLSLTCTVSGGSISSYYWSWIRQPPGKGLEWIGYIYYSGSTNYNPSLKSRVTISVDTSKNQFSLKLSSVTAADTAVYYCARESSSGSYWYFDLWGRGTLVTVSSGGGGSGGGGSGGGGSGGDIQMTQSPSSLSASVGDRVTITCRASQSISSYLNWYQQKPGKAPKLLIYAASSLQSGVPSRFSGSGSGTDFTLTISSLQPEDFATYYCQQSYSTPLTFGGGTKVEIK

SEQ ID NO: 5265 - protein, 250 aa, Artificial Sequence
  HLA-A*03 scFv 19
EVQLVQSGAEVKKPGESLKISCKGSGYSFTSYWIGWVRQMPGKGLEWMGIIYPGDSDTRYSPSFQGQVTISADKSISTAYLQWSSLKASDTAMYYCARDSGYKYNLYYYYYYMDVWGKGTTVTVSSGGGGSGGGGSGGGGSGGDIQMTQSPSSLSASVGDRVTITCRASQSISSYLNWYQQKPGKAPKLLIYAASSLQSGVPSRFSGSGSGTDFTLTISSLQPEDFATYYCQQSYSTPLTFGGGTKVEIK

SEQ ID NO: 5266 - protein, 7 aa, Artificial Sequence
  HC CDR1
SGGYYWS

SEQ ID NO: 5267 - protein, 7 aa, Artificial Sequence
  HC CDR1
SSSYYWG

SEQ ID NO: 5268 - protein, 5 aa, Artificial Sequence
  HC CDR1
SYSMN

SEQ ID NO: 5269 - protein, 5 aa, Artificial Sequence
  HC CDR1
SYYWS

SEQ ID NO: 5270 - protein, 5 aa, Artificial Sequence
  HC CDR1
SYGIS

SEQ ID NO: 5271 - protein, 5 aa, Artificial Sequence
  HC CDR1
SNYMS

SEQ ID NO: 5272 - protein, 7 aa, Artificial Sequence
  HC CDR1
SGSYYWS

SEQ ID NO: 5273 - protein, 5 aa, Artificial Sequence
  CDR-H1
SYWIG

SEQ ID NO: 5274 - protein, 16 aa, Artificial Sequence
  HC CDR2
YIYYSGSTYYNPSLKS

SEQ ID NO: 5275 - protein, 16 aa, Artificial Sequence
  HC CDR2
SIYYSGSTYYNPSLKS

SEQ ID NO: 5276 - protein, 17 aa, Artificial Sequence
  HC CDR2
YISSSSSTIYYADSVKG

SEQ ID NO: 5277 - protein, 16 aa, Artificial Sequence
  HC CDR2
YIYYSGSTNYNPSLKS

SEQ ID NO: 5278 - protein, 17 aa, Artificial Sequence
  HC CDR2
WISAYNGNTNYAQKLQG

SEQ ID NO: 5279 - protein, 16 aa, Artificial Sequence
  HC CDR2
VIYSGGSTYYADSVKG

SEQ ID NO: 5280 - protein, 17 aa, Artificial Sequence
  CDR-H2
IIYPGDSDTRYSPSFQG

SEQ ID NO: 5281 - protein, 11 aa, Artificial Sequence
  CDR-H2
ERVSQRGAFDI

SEQ ID NO: 5282 - protein, 10 aa, Artificial Sequence
  CDR-H2
GNPDKDPFDY

SEQ ID NO: 5283 - protein, 11 aa, Artificial Sequence
  CDR-H2
DFYCTNWYFDL

SEQ ID NO: 5284 - protein, 12 aa, Artificial Sequence
  CDR-H2
ESSSGSYWYFDL

SEQ ID NO: 5285 - protein, 17 aa, Artificial Sequence
  CDR-H2
DSGYKYNLYYYYYYMDV

SEQ ID NO: 5286 - protein, 13 aa, Artificial Sequence
  CDR-H2
GGDLSHYYYYMDV

SEQ ID NO: 5287 - protein, 13 aa, Artificial Sequence
  CDR-H2
ENRRYNSCYYFDY

SEQ ID NO: 5288 - protein, 13 aa, Artificial Sequence
  CDR-H2
GGDLSHYYYYLDV

SEQ ID NO: 5289 - protein, 13 aa, Artificial Sequence
  CDR-H2
ATLLSLSYDAFDI

SEQ ID NO: 5290 - protein, 12 aa, Artificial Sequence
  CDR-H2
GGDLSHYYYMDV

SEQ ID NO: 5291 - protein, 8 aa, Artificial Sequence
  CDR-H2
ERDRWFDP

SEQ ID NO: 5292 - protein, 11 aa, Artificial Sequence
  CDR-H2
ETPPSLGAFDI

SEQ ID NO: 5293 - protein, 14 aa, Artificial Sequence
  CDR-H2
EAYCLSDSYWYFDL

SEQ ID NO: 5294 - protein, 14 aa, Artificial Sequence
  CDR-H2
ESWKYFYPRGYMDV

SEQ ID NO: 5295 - protein, 11 aa, Artificial Sequence
  LC CDR1
RASQSISSYLN

SEQ ID NO: 5296 - protein, 14 aa, Artificial Sequence
  CDR-L1
TGTSSDVGGYNYVS

SEQ ID NO: 5297 - protein, 14 aa, Artificial Sequence
  CDR-L1
ASSTGAVTSGYYPN

SEQ ID NO: 5298 - protein, 13 aa, Artificial Sequence
  CDR-L1
SGSSSNIGSNTVN

SEQ ID NO: 5299 - protein, 7 aa, Artificial Sequence
  LC CDR2
AASSLQS

SEQ ID NO: 5300 - protein, 7 aa, Artificial Sequence
  CDR-L2
STSNKHS

SEQ ID NO: 5301 - protein, 7 aa, Artificial Sequence
  CDR-L2
EVSKRPS

SEQ ID NO: 5302 - protein, 7 aa, Artificial Sequence
  CDR-L2
SNNQRPS

SEQ ID NO: 5303 - protein, 10 aa, Artificial Sequence
  CDR-L3
LLYYGGAQWV

SEQ ID NO: 5304 - DNA, 10 bp, Artificial Sequence
  CDR-L3
  misc_feature (7)..(8): n is a, c, g, or t
ssyagsnnwv

SEQ ID NO: 5305 - protein, 11 aa, Artificial Sequence
  CDR-L3
AAWDDSLNGWV

SEQ ID NO: 5306 - protein, 9 aa, Artificial Sequence
  LC CDR3
QQSYSTPLT

SEQ ID NO: 5307 - protein, 243 aa, Artificial Sequence
  HLA-A11 antigen binding domain 9
QVQLQESGPGLVKPSQTLSLTCTVSGGSISSGGYYWSWIRQPPGKGLEWIGYIYYSGSTYYNPSLKSRVTISVDTSKNQFSLKLSSVTAADTAVYYCARHYYYYSMDVWGKGTTVTVSSGGGGSGGGGSGGGGSGGDIQMTQSPSSLSASVGDRVTITCRASQSISSYLNWYQQKPGKAPKLLIYAASSLQSGVPSRFSGSGSGTDFTLTISSLQPEDFATYYCQQSYSTPLTFGGGTKVEIK

SEQ ID NO: 5308 - protein, 244 aa, Artificial Sequence
  HLA-A11 antigen binding domain 8
QITLKESGPTLVKPTQTLTLTCTFSGFSLSTSGVGVGWIRQPPGKALEWLALIYWNDDKRYSPSLKSRLTITKDTSKNQVVLTMTNMDPVDTATYYCAHRHMRLSCFDYWGQGTLVTVSSGGGGSGGGGSGGGGSGGDIQMTQSPSSLSASVGDRVTITCRASQSISSYLNWYQQKPGKAPKLLIYAASSLQSGVPSRFSGSGSGTDFTLTISSLQPEDFATYYCQQSYSTPLTFGGGTKVEIK

SEQ ID NO: 5309 - protein, 245 aa, Artificial Sequence
  HLA-A11 antigen binding domain 7
QVQLVQSGAEVKKPGASVKVSCKASGYTFTSYAMHWVRQAPGQRLEWMGWINAGNGNTKYSQKFQGRVTITRDTSASTAYMELSSLRSEDTAVYYCAREGNGANPDAFDIWGQGTMVTVSSGGGGSGGGGSGGGGSGGDIQMTQSPSSLSASVGDRVTITCRASQSISSYLNWYQQKPGKAPKLLIYAASSLQSGVPSRFSGSGSGTDFTLTISSLQPEDFATYYCQQSYSTPLTFGGGTKVEIK

SEQ ID NO: 5310 - protein, 243 aa, Artificial Sequence
  HLA-A11 antigen binding domain 6
EVQLVESGGGLVQPGGSLRLSCAASGFTFSSYDMHWVRQATGKGLEWVSAIGTAGDTYYPGSVKGRFTISRENAKNSLYLQMNSLRAGDTAVYYCARDLPGSYWYFDLWGRGTLVTVSSGGGGSGGGGSGGGGSGGDIQMTQSPSSLSASVGDRVTITCRASQSISSYLNWYQQKPGKAPKLLIYAASSLQSGVPSRFSGSGSGTDFTLTISSLQPEDFATYYCQQSYSTPLTFGGGTKVEIK

SEQ ID NO: 5311 - protein, 243 aa, Artificial Sequence
  HLA-A11 antigen binding domain 5
QVQLQESGPGLVKPSQTLSLTCTVSGGSISSGGYYWSWIRQPPGKGLEWIGYIYYSGSTYYNPSLKSRVTISVDTSKNQFSLKLSSVTAADTAVYYCARHYYYYYLDVWGKGTTVTVSSGGGGSGGGGSGGGGSGGDIQMTQSPSSLSASVGDRVTITCRASQSISSYLNWYQQKPGKAPKLLIYAASSLQSGVPSRFSGSGSGTDFTLTISSLQPEDFATYYCQQSYSTPLTFGGGTKVEIK

SEQ ID NO: 5312 - protein, 243 aa, Artificial Sequence
  HLA-A11 antigen binding domain 4
EVQLVESGGGLVQPGGSLRLSCAASGFTFSSYWMHWVRQAPGKGLVWVSRINSDGSSTSYADSVKGRFTISRDNAKNTLYLQMNSLRAEDTAVYYCCLGVLLYNWFDPWGQGTLVTVSSGGGGSGGGGSGGGGSGGDIQMTQSPSSLSASVGDRVTITCRASQSISSYLNWYQQKPGKAPKLLIYAASSLQSGVPSRFSGSGSGTDFTLTISSLQPEDFATYYCQQSYSTPLTFGGGTKVEIK

SEQ ID NO: 5313 - protein, 242 aa, Artificial Sequence
  HLA-A11 antigen binding domain 3
QVQLQESGPGLVKPSQTLSLTCTVSGGSISSGGYYWSWIRQPPGKGLEWIGYIYYSGSTYYNPSLKSRVTISVDTSKNQFSLKLSSVTAADTAVYYCARHYYYYMDVWGKGTTVTVSSGGGGSGGGGSGGGGSGGDIQMTQSPSSLSASVGDRVTITCRASQSISSYLNWYQQKPGKAPKLLIYAASSLQSGVPSRFSGSGSGTDFTLTISSLQPEDFATYYCQQSYSTPLTFGGGTKVEIK

SEQ ID NO: 5314 - protein, 243 aa, Artificial Sequence
  HLA-A11 antigen binding domain 2
QITLKESGPTLVKPTQTLTLTCTFSGFSLSTSGVGVGWIRQPPGKALEWLALIYWNDDKRYSPSLKSRLTITKDTSKNQVVLTMTNMDPVDTATYYCAHKTTSFYFDYWGQGTLVTVSSGGGGSGGGGSGGGGSGGDIQMTQSPSSLSASVGDRVTITCRASQSISSYLNWYQQKPGKAPKLLIYAASSLQSGVPSRFSGSGSGTDFTLTISSLQPEDFATYYCQQSYSTPLTFGGGTKVEIK

SEQ ID NO: 5315 - protein, 243 aa, Artificial Sequence
  HLA-A11 antigen binding domain 1
QVQLQESGPGLVKPSQTLSLTCTVSGGSISSGGYYWSWIRQPPGKGLEWIGYIYYSGSTYYNPSLKSRVTISVDTSKNQFSLKLSSVTAADTAVYYCARHYYYYYMDVWGKGTTVTVSSGGGGSGGGGSGGGGSGGDIQMTQSPSSLSASVGDRVTITCRASQSISSYLNWYQQKPGKAPKLLIYAASSLQSGVPSRFSGSGSGTDFTLTISSLQPEDFATYYCQQSYSTPLTFGGGTKVEIK

SEQ ID NO: 5316 - protein, 7 aa, Artificial Sequence
  HC CDR1
SGGYYWS

SEQ ID NO: 5317 - protein, 7 aa, Artificial Sequence
  CDR-H1
TSGVGVG

SEQ ID NO: 5318 - protein, 5 aa, Artificial Sequence
  HC CDR1
SYWMH

SEQ ID NO: 5319 - protein, 5 aa, Artificial Sequence
  CDR-H1
SYDMH

SEQ ID NO: 5320 - protein, 5 aa, Artificial Sequence
  HC CDR1
SYAMH

SEQ ID NO: 5321 - protein, 16 aa, Artificial Sequence
  HC CDR2
YIYYSGSTYYNPSLKS

SEQ ID NO: 5322 - protein, 16 aa, Artificial Sequence
  CDR-H2
LIYWNDDKRYSPSLKS

SEQ ID NO: 5323 - protein, 17 aa, Artificial Sequence
  HC CDR2
RINSDGSSTSYADSVKG

SEQ ID NO: 5324 - protein, 16 aa, Artificial Sequence
  CDR-H2
AIGTAGDTYYPGSVKG

SEQ ID NO: 5325 - protein, 17 aa, Artificial Sequence
  MSLN scFv domain HC CDR2
WINAGNGNTKYSQKFQG

SEQ ID NO: 5326 - protein, 9 aa, Artificial Sequence
  CDR-H2
HYYYYYMDV

SEQ ID NO: 5327 - protein, 9 aa, Artificial Sequence
  CDR-H2
KTTSFYFDY

SEQ ID NO: 5328 - protein, 8 aa, Artificial Sequence
  CDR-H2
HYYYYMDV

SEQ ID NO: 5329 - protein, 10 aa, Artificial Sequence
  CDR-H2
GVLLYNWFDP

SEQ ID NO: 5330 - protein, 9 aa, Artificial Sequence
  CDR-H2
HYYYYYLDV

SEQ ID NO: 5331 - protein, 11 aa, Artificial Sequence
  CDR-H2
DLPGSYWYFDL

SEQ ID NO: 5332 - protein, 12 aa, Artificial Sequence
  CDR-H2
EGNGANPDAFDI

SEQ ID NO: 5333 - protein, 10 aa, Artificial Sequence
  CDR-H2
RHMRLSCFDY

SEQ ID NO: 5334 - protein, 9 aa, Artificial Sequence
  CDR-H2
HYYYYSMDV

SEQ ID NO: 5335 - protein, 244 aa, Artificial Sequence
  HLA-B07 antigen binding domain BB7.1.10_scFv
QVQLQESGPGLVKPSQTLSLTCTVSGYSITSGYSWHWIRQPPGKGLEWIGYIHFSGSTHYHPSLKSRVTISVDTSKNQFSLKLSSVTAADTAVYYCARGGVVSHYAMDCWGQGTTVTVSSGGGGSGGGGSGGGGSGGDIQMTQSPSSLSASVGDRVTITCRASENIYSNLAWYQQKPGKAPKLLIYAATYLPDGVPSRFSGSGSGTDFTLTISSLQPEDFATYYCQHFWVTPYTFGGGTKVEIK

SEQ ID NO: 5336 - protein, 244 aa, Artificial Sequence
  HLA-B*07 antigen binding domain BB7.1.9_scFv
EVQLVESGGGLVKPGGSLRLSCAASGYSITSGYSWHWVRQAPGKGLEWVSYIHFSGSTHYHPSLKSRFTISRDNAKNSLYLQMNSLRAEDTAVYYCARGGVVSHYAMDCWGQGTTVTVSSGGGGSGGGGSGGGGSGGDIQMTQSPSSVSASVGDRVTITCRASENIYSNLAWYQQKPGKAPKLLIYAATYLPDGVPSRFSGSGSGTDFTLTISSLQPEDFATYYCQHFWVTPYTFGGGTKVEIK

SEQ ID NO: 5337 - protein, 244 aa, Artificial Sequence
  HLA-B07 antigen binding domain BB7.1.8_scFv
EVQLVESGGGLVKPGGSLRLSCAASGYSITSGYSWHWVRQAPGKGLEWVGYIHFSGSTHYHPSLKSRFTISRDDSKNTLYLQMNSLKTEDTAVYYCARGGVVSHYAMDCWGQGTTVTVSSGGGGSGGGGSGGGGSGGEIVLTQSPATLSLSPGERATLSCRASENIYSNLAWYQQKPGQAPRLLIYAATYLPDGIPARFSGSGSGTDFTLTISSLEPEDFAVYYCQHFWVTPYTFGGGTKVEIK

SEQ ID NO: 5338 - protein, 244 aa, Artificial Sequence
  HLA-B*07 antigen binding domain BB7.1.7_scFv
QVQLQQSGPGLVKPSQTLSLTCAISGYSITSGYSWHWIRQSPSRGLEWLGYIHFSGSTHYHPSLKSRITINPDTSKNQFSLQLNSVTPEDTAVYYCARGGVVSHYAMDCWGQGTTVTVSSGGGGSGGGGSGGGGSGGEIVLTQSPATLSLSPGERATLSCRASENIYSNLAWYQQKPGQAPRLLIYAATYLPDGIPARFSGSGSGTDFTLTISRLEPEDFAVYYCQHFWVTPYTFGGGTKVEIK

SEQ ID NO: 5339 - protein, 244 aa, Artificial Sequence
  HLA-B*07 antigen binding domain BB7.1.6_scFv
EVQLVESGGGLVKPGGSLRLSCAASGYSITSGYSWHWVRQAPGKGLEWVGYIHFSGSTHYHPSLKSRFTISRDDSKNTLYLQMNSLKTEDTAVYYCARGGVVSHYAMDCWGQGTTVTVSSGGGGSGGGGSGGGGSGGDIQMTQSPSSVSASVGDRVTITCRASENIYSNLAWYQQKPGKAPKLLIYAATYLPDGVPSRFSGSGSGTDFTLTISSLQPEDFATYYCQHFWVTPYTFGGGTKVEIK

SEQ ID NO: 5340 - protein, 244 aa, Artificial Sequence
  HLA-B*07 antigen binding domain BB7.1.5_scFv
EVQLVESGGGLVQPGGSLRLSCAASGYSITSGYSWHWVRQAPGKGLEWVSYIHFSGSTHYHPSLKSRFTISRDNSKNTLYLQMNSLRAEDTAVYYCARGGVVSHYAMDCWGQGTTVTVSSGGGGSGGGGSGGGGSGGDIQMTQSPSSLSASVGDRVTITCRASENIYSNLAWYQQKPGKAPKLLIYAATYLPDGVPSRFSGSGSGTDFTLTISSLQPEDFATYYCQHFWVTPYTFGGGTKVEIK

SEQ ID NO: 5341 - protein, 244 aa, Artificial Sequence
  HLA-B*07 antigen binding domain BB7.1.4_scFv
EVQLVESGGGLVKPGGSLRLSCAASGYSITSGYSWHWVRQAPGKGLEWVGYIHFSGSTHYHPSLKSRFTISRDDSKNTLYLQMNSLKTEDTAVYYCARGGVVSHYAMDCWGQGTTVTVSSGGGGSGGGGSGGGGSGGDIQMTQSPSSLSASVGDRVTITCRASENIYSNLAWYQQKPGKAPKLLIYAATYLPDGVPSRFSGSGSGTDFTLTISSLQPEDFATYYCQHFWVTPYTFGGGTKVEIK

SEQ ID NO: 5342 - protein, 244 aa, Artificial Sequence
  HLA-B*07 antigen binding domain BB7.1.3_scFv
QVQLQQWGAGLLKPSETLSLTCAVYGYSITSGYSWHWIRQPPGKGLEWIGYIHFSGSTHYHPSLKSRVTISVDTSKNQFSLKLSSVTAADTAVYYCARGGVVSHYAMDCWGQGTTVTVSSGGGGSGGGGSGGGGSGGDIQMTQSPSSLSASVGDRVTITCRASENIYSNLAWYQQKPGKAPKLLIYAATYLPDGVPSRFSGSGSGTDFTLTISSLQPEDFATYYCQHFWVTPYTFGGGTKVEIK

SEQ ID NO: 5343 - protein, 244 aa, Artificial Sequence
  HLA-B*07 antigen binding domain BB7.1.2_scFv
QVQLQESGPGLVKPSQTLSLTCTVSGYSITSGYSWHWIRQHPGKGLEWIGYIHFSGSTHYHPSLKSRVTISVDTSKNQFSLKLSSVTAADTAVYYCARGGVVSHYAMDCWGQGTTVTVSSGGGGSGGGGSGGGGSGGDIQMTQSPSSLSASVGDRVTITCRASENIYSNLAWYQQKPGKAPKLLIYAATYLPDGVPSRFSGSGSGTDFTLTISSLQPEDFATYYCQHFWVTPYTFGGGTKVEIK

SEQ ID NO: 5344 - protein, 244 aa, Artificial Sequence
  HLA-B*07 antigen binding domain BB7.1.1_scFv
QVQLQQSGPGLVKPSQTLSLTCAISGYSITSGYSWHWIRQSPSRGLEWLGYIHFSGSTHYHPSLKSRITINPDTSKNQFSLQLNSVTPEDTAVYYCARGGVVSHYAMDCWGQGTTVTVSSGGGGSGGGGSGGGGSGGDIQMTQSPSSLSASVGDRVTITCRASENIYSNLAWYQQKPGKAPKLLIYAATYLPDGVPSRFSGSGSGTDFTLTISSLQPEDFATYYCQHFWVTPYTFGGGTKVEIK

SEQ ID NO: 5345 - protein, 6 aa, Artificial Sequence
  CDR-H1
SGYSWH

SEQ ID NO: 5346 - protein, 16 aa, Artificial Sequence
  CDR-H2
YIHFSGSTHYHPSLKS

SEQ ID NO: 5347 - protein, 11 aa, Artificial Sequence
  CDR-H2
GGVVSHYAMDC

SEQ ID NO: 5348 - protein, 11 aa, Artificial Sequence
  CDR-L1
RASENIYSNLA

SEQ ID NO: 5349 - protein, 7 aa, Artificial Sequence
  CDR-L2
AATYLPD

SEQ ID NO: 5350 - protein, 9 aa, Artificial Sequence
  CDR-L3
QHFWVTPYT

SEQ ID NO: 5351 - protein, 240 aa, Artificial Sequence
  HLA-C*07 antigen binding domain C7-45
EVQLLESGGGLVQPGGSLRLSCAASGFTFSSYAMSWVRQAPGKGLEWVSAISGSGGSTYYADSVKGRFTISRDNSKNTLYLQMNSLRAEDTAVYYCAVSFDWFDPWGQGTLVTVSSGGGGSGGGGSGGGGSGGDIQMTQSPSSLSASVGDRVTITCRASQSISSYLNWYQQKPGKAPKLLIYAASSLQSGVPSRFSGSGSGTDFTLTISSLQPEDFATYYCQQSYSTPLTFGGGTKVEIK

SEQ ID NO: 5352 - protein, 248 aa, Artificial Sequence
  HLA-C*07 antigen binding domain C7-44
QVQLQESGPGLVKPSQTLSLTCTVSGGSISSGGYYWSWIRQPPGKGLEWIGYIYYSGSTYYNPSLKSRVTISVDTSKNQFSLKLSSVTAADTAVYYCARERSISPYYYYYMDVWGKGTTVTVSSGGGGSGGGGSGGGGSGGDIQMTQSPSSLSASVGDRVTITCRASQSISSYLNWYQQKPGKAPKLLIYAASSLQSGVPSRFSGSGSGTDFTLTISSLQPEDFATYYCQQSYSTPLTFGGGTKVEIK

SEQ ID NO: 5353 - protein, 247 aa, Artificial Sequence
  HLA-C*07 antigen binding domain C7-43
QLQLQESGPGLVKPSETLSLTCTVSGGSISSSSYYWGWIRQPPGKGLEWIGSIYYSGSTYYNPSLKSRVTISVDTSKNQFSLKLSSVTAADTAVYYCARDSVIWYWFDPWGQGTLVTVSSGGGGSGGGGSGGGGSGGQSVLTQPPSASGTPGQRVTISCSGSSSNIGSNTVNWYQQLPGTAPKLLIYSNNQRPSGVPDRFSGSKSGTSASLAISGLQSEDEADYYCAAWDDSLNGWVFGGGTKLTVL

SEQ ID NO: 5354 - protein, 249 aa, Artificial Sequence
  HLA-C*07 antigen binding domain C7-42
QVQLQESGPGLVKPSQTLSLTCTVSGGSISSGGYYWSWIRQPPGKGLEWIGYIYYSGSTYYNPSLKSRVTISVDTSKNQFSLKLSSVTAADTAVYYCAREEILPRLSYYYYMDVWGKGTTVTVSSGGGGSGGGGSGGGGSGGDIQMTQSPSSLSASVGDRVTITCRASQSISSYLNWYQQKPGKAPKLLIYAASSLQSGVPSRFSGSGSGTDFTLTISSLQPEDFATYYCQQSYSTPLTFGGGTKVEIK

SEQ ID NO: 5355 - protein, 245 aa, Artificial Sequence
  HLA-C*07 antigen binding domain C7-41
QVQLVQSGSELKKPGASVKVSCKASGYTFTSYAMNWVRQAPGQGLEWMGWINTNTGNPTYAQGFTGRFVFSFDTSVSTAYLQICSLKAEDTAVYYCARGGRAHSSWYFDLWGRGTLVTVSSGGGGSGGGGSGGGGSGGDIQMTQSPSSLSASVGDRVTITCRASQSISSYLNWYQQKPGKAPKLLIYAASSLQSGVPSRFSGSGSGTDFTLTISSLQPEDFATYYCQQSYSTPLTFGGGTKVEIK

SEQ ID NO: 5356 - protein, 251 aa, Artificial Sequence
  HLA-C*07 antigen binding domain C7-40
QVQLQESGPGLVKPSQTLSLTCTVSGGSISSGGYYWSWIRQPPGKGLEWIGYIYYSGSTYYNPSLKSRVTISVDTSKNQFSLKLSSVTAADTAVYYCARDRIKILPRLGYYYYMDVWGKGTTVTVSSGGGGSGGGGSGGGGSGGDIQMTQSPSSLSASVGDRVTITCRASQSISSYLNWYQQKPGKAPKLLIYAASSLQSGVPSRFSGSGSGTDFTLTISSLQPEDFATYYCQQSYSTPLTFGGGTKVEIK

SEQ ID NO: 5357 - protein, 246 aa, Artificial Sequence
  HLA-C*07 antigen binding domain C7-39
QVQLQESGPGLVKPSQTLSLTCTVSGGSISSGGYYWSWIRQPPGKGLEWIGYIYYSGSTYYNPSLKSRVTISVDTSKNQFSLKLSSVTAADTAVYYCARDTVIHYYYYMDVWGKGTTVTVSSGGGGSGGGGSGGGGSGGDIQMTQSPSSLSASVGDRVTITCRASQSISSYLNWYQQKPGKAPKLLIYAASSLQSGVPSRFSGSGSGTDFTLTISSLQPEDFATYYCQQSYSTPLTFGGGTKVEIK

SEQ ID NO: 5358 - protein, 250 aa, Artificial Sequence
  HLA-C*07 antigen binding domain C7-38
QVQLQESGPGLVKPSQTLSLTCTVSGGSISSGGYYWSWIRQPPGKGLEWIGYIYYSGSTYYNPSLKSRVTISVDTSKNQFSLKLSSVTAADTAVYYCARDVIVEVFLSYYYYMDVWGKGTTVTVSSGGGGSGGGGSGGGGSGGDIQMTQSPSSLSASVGDRVTITCRASQSISSYLNWYQQKPGKAPKLLIYAASSLQSGVPSRFSGSGSGTDFTLTISSLQPEDFATYYCQQSYSTPLTFGGGTKVEIK

SEQ ID NO: 5359 - protein, 246 aa, Artificial Sequence
  HLA-C*07 antigen binding domain C7-37
QVQLQESGPGLVKPSQTLSLTCTVSGGSISSGGYYWSWIRQPPGKGLEWIGYIYYSGSTYYNPSLKSRVTISVDTSKNQFSLKLSSVTAADTAVYYCARDIFIHYYYYMDVWGKGTTVTVSSGGGGSGGGGSGGGGSGGDIQMTQSPSSLSASVGDRVTITCRASQSISSYLNWYQQKPGKAPKLLIYAASSLQSGVPSRFSGSGSGTDFTLTISSLQPEDFATYYCQQSYSTPLTFGGGTKVEIK

SEQ ID NO: 5360 - protein, 247 aa, Artificial Sequence
  HLA-C*07 antigen binding domain C7-36
EVQLVESGGGLVQPGGSLRLSCAASGFTFSSYSMNWVRQAPGKGLEWVSYISSSSSTIYYADSVKGRFTISRDNAKNSLYLQMNSLRAEDTAVYYCARDGTFYSYSPYYFDYWGQGTLVTVSSGGGGSGGGGSGGGGSGGDIQMTQSPSSLSASVGDRVTITCRASQSISSYLNWYQQKPGKAPKLLIYAASSLQSGVPSRFSGSGSGTDFTLTISSLQPEDFATYYCQQSYSTPLTFGGGTKVEIK

SEQ ID NO: 5361 - protein, 251 aa, Artificial Sequence
  HLA-C*07 antigen binding domain C7-35
QVQLQESGPGLVKPSQTLSLTCTVSGGSISSGGYYWSWIRQPPGKGLEWIGYIYYSGSTYYNPSLKSRVTISVDTSKNQFSLKLSSVTAADTAVYYCAREWIKILPRLGYYYYMDVWGKGTTVTVSSGGGGSGGGGSGGGGSGGDIQMTQSPSSLSASVGDRVTITCRASQSISSYLNWYQQKPGKAPKLLIYAASSLQSGVPSRFSGSGSGTDFTLTISSLQPEDFATYYCQQSYSTPLTFGGGTKVEIK

SEQ ID NO: 5362 - protein, 246 aa, Artificial Sequence
  HLA-C*07 antigen binding domain C7-34
QVQLQESGPGLVKPSQTLSLTCTVSGGSISSGGYYWSWIRQPPGKGLEWIGYIYYSGSTYYNPSLKSRVTISVDTSKNQFSLKLSSVTAADTAVYYCARDRSLYYYYYMDVWGKGTTVTVSSGGGGSGGGGSGGGGSGGDIQMTQSPSSLSASVGDRVTITCRASQSISSYLNWYQQKPGKAPKLLIYAASSLQSGVPSRFSGSGSGTDFTLTISSLQPEDFATYYCQQSYSTPLTFGGGTKVEIK

SEQ ID NO: 5363 - protein, 248 aa, Artificial Sequence
  HLA-C*07 antigen binding domain C7-33
QVQLQESGPGLVKPSQTLSLTCTVSGGSISSGGYYWSWIRQPPGKGLEWIGYIYYSGSTYYNPSLKSRVTISVDTSKNQFSLKLSSVTAADTAVYYCARDKILAPNYYYYMDVWGKGTTVTVSSGGGGSGGGGSGGGGSGGDIQMTQSPSSLSASVGDRVTITCRASQSISSYLNWYQQKPGKAPKLLIYAASSLQSGVPSRFSGSGSGTDFTLTISSLQPEDFATYYCQQSYSTPLTFGGGTKVEIK

SEQ ID NO: 5364 - protein, 250 aa, Artificial Sequence
  HLA-C*07 antigen binding domain C7-32
QVQLQESGPGLVKPSQTLSLTCTVSGGSISSGGYYWSWIRQPPGKGLEWIGYIYYSGSTYYNPSLKSRVTISVDTSKNQFSLKLSSVTAADTAVYYCAREKSWKYFYYYYYYMDVWGKGTTVTVSSGGGGSGGGGSGGGGSGGDIQMTQSPSSLSASVGDRVTITCRASQSISSYLNWYQQKPGKAPKLLIYAASSLQSGVPSRFSGSGSGTDFTLTISSLQPEDFATYYCQQSYSTPLTFGGGTKVEIK

SEQ ID NO: 5365 - protein, 249 aa, Artificial Sequence
  HLA-C*07 antigen binding domain C7-31
QVQLQESGPGLVKPSQTLSLTCTVSGGSISSGGYYWSWIRQPPGKGLEWIGYIYYSGSTYYNPSLKSRVTISVDTSKNQFSLKLSSVTAADTAVYYCARENTSTIPYYYYYMDVWGKGTTVTVSSGGGGSGGGGSGGGGSGGDIQMTQSPSSLSASVGDRVTITCRASQSISSYLNWYQQKPGKAPKLLIYAASSLQSGVPSRFSGSGSGTDFTLTISSLQPEDFATYYCQQSYSTPLTFGGGTKVEIK

SEQ ID NO: 5366 - protein, 253 aa, Artificial Sequence
  HLA-C*07 antigen binding domain C7-30
QVQLQESGPGLVKPSQTLSLTCTVSGGSISSGGYYWSWIRQPPGKGLEWIGYIYYSGSTYYNPSLKSRVTISVDTSKNQFSLKLSSVTAADTAVYYCAREDVDKNTSTIYYYYYYMDVWGKGTTVTVSSGGGGSGGGGSGGGGSGGDIQMTQSPSSLSASVGDRVTITCRASQSISSYLNWYQQKPGKAPKLLIYAASSLQSGVPSRFSGSGSGTDFTLTISSLQPEDFATYYCQQSYSTPLTFGGGTKVEIK

SEQ ID NO: 5367 - protein, 250 aa, Artificial Sequence
  HLA-C*07 antigen binding domain C7-29
QVQLVESGGGLVKPGGSLRLSCAASGFTFSDYYMSWIRQAPGKGLEWVSYISSSGSTIYYADSVKGRFTISRDNAKNSLYLQMNSLRAEDTAVYYCARDGGDIVSSSAIYWYFDLWGRGTLVTVSSGGGGSGGGGSGGGGSGGAIQLTQSPSSLSASVGDRVTITCRASQGISSALAWYQQKPGKAPKLLIYDASSLESGVPSRFSGSGSGTDFTLTISSLQPEDFATYYCQQFNSYPLTFGGGTKVEIK

SEQ ID NO: 5368 - protein, 248 aa, Artificial Sequence
  HLA-C*07 antigen binding domain C7-28
QVQLQESGPGLVKPSQTLSLTCTVSGGSISSGGYYWSWIRQPPGKGLEWIGYIYYSGSTYYNPSLKSRVTISVDTSKNQFSLKLSSVTAADTAVYYCARDLILPPYYYYYMDVWGKGTTVTVSSGGGGSGGGGSGGGGSGGDIQMTQSPSSLSASVGDRVTITCRASQSISSYLNWYQQKPGKAPKLLIYAASSLQSGVPSRFSGSGSGTDFTLTISSLQPEDFATYYCQQSYSTPLTFGGGTKVEIK

SEQ ID NO: 5369 - protein, 253 aa, Artificial Sequence
  HLA-C*07 antigen binding domain C7-27
QVQLQESGPGLVKPSQTLSLTCTVSGGSISSGGYYWSWIRQPPGKGLEWIGYIYYSGSTYYNPSLKSRVTISVDTSKNQFSLKLSSVTAADTAVYYCARETWIKILPRYYYYYYYMDVWGKGTTVTVSSGGGGSGGGGSGGGGSGGDIQMTQSPSSLSASVGDRVTITCRASQSISSYLNWYQQKPGKAPKLLIYAASSLQSGVPSRFSGSGSGTDFTLTISSLQPEDFATYYCQQSYSTPLTFGGGTKVEIK

SEQ ID NO: 5370 - protein, 246 aa, Artificial Sequence
  HLA-C*07 antigen binding domain C7-26
QVQLQESGPGLVKPSQTLSLTCTVSGGSISSGGYYWSWIRQPPGKGLEWIGYIYYSGSTYYNPSLKSRVTISVDTSKNQFSLKLSSVTAADTAVYYCARDLSRYYYYYMDVWGKGTTVTVSSGGGGSGGGGSGGGGSGGDIQMTQSPSSLSASVGDRVTITCRASQSISSYLNWYQQKPGKAPKLLIYAASSLQSGVPSRFSGSGSGTDFTLTISSLQPEDFATYYCQQSYSTPLTFGGGTKVEIK

SEQ ID NO: 5371 - protein, 242 aa, Artificial Sequence
  HLA-C*07 antigen binding domain C7-25
EVQLVESGGGLVQPGGSLRLSCAASGFTFSSYSMNWVRQAPGKGLEWVSYISSSSSTIYYADSVKGRFTISRDNAKNSLYLQMNSLRAEDTAVYYCAREHIVLCFDYWGQGTLVTVSSGGGGSGGGGSGGGGSGGDIQMTQSPSSLSASVGDRVTITCRASQGISSWLAWYQQKPEKAPKSLIYAASSLQSGVPSRFSGSGSGTDFTLTISSLQPEDFATYYCQQYNSYPLTFGGGTKVEIK

SEQ ID NO: 5372 - protein, 249 aa, Artificial Sequence
  HLA-C*07 antigen binding domain C7-24
QVQLQESGPGLVKPSQTLSLTCTVSGGSISSGGYYWSWIRQPPGKGLEWIGYIYYSGSTYYNPSLKSRVTISVDTSKNQFSLKLSSVTAADTAVYYCARDKILPRPYYYYYMDVWGKGTTVTVSSGGGGSGGGGSGGGGSGGDIQMTQSPSSLSASVGDRVTITCRASQSISSYLNWYQQKPGKAPKLLIYAASSLQSGVPSRFSGSGSGTDFTLTISSLQPEDFATYYCQQSYSTPLTFGGGTKVEIK

SEQ ID NO: 5373 - protein, 244 aa, Artificial Sequence
  HLA-C*07 antigen binding domain C7-23
QVQLVQSGAEVKKPGASVKVSCKASGYTFTSYGISWVRQAPGQGLEWMGWISAYNGNTNYAQKLQGRVTMTTDTSTSTAYMELRSLRSDDTAVYYCARGSNEYFQHWGQGTLVTVSSGGGGSGGGGSGGGGSGGQSALTQPPSASGSPGQSVTISCTGTSSDVGGYNYVSWYQQHPGKAPKLMIYEVSKRPSGVPDRFSGSKSGNTASLTVSGLQAEDEADYYCSSYAGSNNWVFGGGTKLTVL

SEQ ID NO: 5374 - protein, 242 aa, Artificial Sequence
  HLA-C*07 antigen binding domain C7-22
QVQLVQSGSELKKPGASVKVSCKASGYTFTSYAMNWVRQAPGQGLEWMGWINTNTGNPTYAQGFTGRFVFSFDTSVSTAYLQICSLKAEDTAVYYCARGTSYWYFDLWGRGTLVTVSSGGGGSGGGGSGGGGSGGDIQMTQSPSSLSASVGDRVTITCRASQSISSYLNWYQQKPGKAPKLLIYAASSLQSGVPSRFSGSGSGTDFTLTISSLQPEDFATYYCQQSYSTPLTFGGGTKVEIK

SEQ ID NO: 5375 - protein, 248 aa, Artificial Sequence
  HLA-C*07 antigen binding domain C7-21
QVQLQESGPGLVKPSQTLSLTCTVSGGSISSGGYYWSWIRQPPGKGLEWIGYIYYSGSTYYNPSLKSRVTISVDTSKNQFSLKLSSVTAADTAVYYCAREEIVEVFYYYYMDVWGKGTTVTVSSGGGGSGGGGSGGGGSGGDIQMTQSPSSLSASVGDRVTITCRASQSISSYLNWYQQKPGKAPKLLIYAASSLQSGVPSRFSGSGSGTDFTLTISSLQPEDFATYYCQQSYSTPLTFGGGTKVEIK

SEQ ID NO: 5376 - protein, 241 aa, Artificial Sequence
  HLA-C*07 antigen binding domain C7-20
EVQLLESGGGLVQPGGSLRLSCAASGFTFSSYAMSWVRQAPGKGLEWVSAISGSGGSTYYADSVKGRFTISRDNSKNTLYLQMNSLRAEDTAVYYCAKVDDYYFDYWGQGTLVTVSSGGGGSGGGGSGGGGSGGDIQMTQSPSSLSASVGDRVTITCRASQSISSYLNWYQQKPGKAPKLLIYAASSLQSGVPSRFSGSGSGTDFTLTISSLQPEDFATYYCQQSYSTPLTFGGGTKVEIK

SEQ ID NO: 5377 - protein, 247 aa, Artificial Sequence
  HLA-C*07 antigen binding domain C7-19
EVQLVESGGGLVQPGGSLRLSCAASGFTFSSYWMHWVRQAPGKGLVWVSRINSDGSSTSYADSVKGRFTISRDNAKNTLYLQMNSLRAEDTAVYYCAWSTNILLSYTKAFDIWGQGTMVTVSSGGGGSGGGGSGGGGSGGDIQMTQSPSSLSASVGDRVTITCRASQSISSYLNWYQQKPGKAPKLLIYAASSLQSGVPSRFSGSGSGTDFTLTISSLQPEDFATYYCQQSYSTPLTFGGGTKVEIK

SEQ ID NO: 5378 - protein, 246 aa, Artificial Sequence
  HLA-C*07 antigen binding domain C7-18
QVQLQESGPGLVKPSQTLSLTCTVSGGSISSGGYYWSWIRQPPGKGLEWIGYIYYSGSTYYNPSLKSRVTISVDTSKNQFSLKLSSVTAADTAVYYCARDKTYYYYYYMDVWGKGTTVTVSSGGGGSGGGGSGGGGSGGDIQMTQSPSSLSASVGDRVTITCRASQSISSYLNWYQQKPGKAPKLLIYAASSLQSGVPSRFSGSGSGTDFTLTISSLQPEDFATYYCQQSYSTPLTFGGGTKVEIK

SEQ ID NO: 5379 - protein, 253 aa, Artificial Sequence
  HLA-C*07 antigen binding domain C7-17
QVQLQESGPGLVKPSQTLSLTCTVSGGSISSGGYYWSWIRQPPGKGLEWIGYIYYSGSTYYNPSLKSRVTISVDTSKNQFSLKLSSVTAADTAVYYCAREKYFHDKYFHDYYYYYMDVWGKGTTVTVSSGGGGSGGGGSGGGGSGGDIQMTQSPSSLSASVGDRVTITCRASQSISSYLNWYQQKPGKAPKLLIYAASSLQSGVPSRFSGSGSGTDFTLTISSLQPEDFATYYCQQSYSTPLTFGGGTKVEIK

SEQ ID NO: 5380 - protein, 246 aa, Artificial Sequence
  HLA-C*07 antigen binding domain C7-16
QVQLQESGPGLVKPSQTLSLTCTVSGGSISSGGYYWSWIRQPPGKGLEWIGYIYYSGSTYYNPSLKSRVTISVDTSKNQFSLKLSSVTAADTAVYYCARDTSVYYYYYMDVWGKGTTVTVSSGGGGSGGGGSGGGGSGGDIQMTQSPSSLSASVGDRVTITCRASQSISSYLNWYQQKPGKAPKLLIYAASSLQSGVPSRFSGSGSGTDFTLTISSLQPEDFATYYCQQSYSTPLTFGGGTKVEIK

SEQ ID NO: 5381 - protein, 248 aa, Artificial Sequence
  HLA-C*07 antigen binding domain C7-15
QVQLQESGPGLVKPSQTLSLTCTVSGGSISSGGYYWSWIRQPPGKGLEWIGYIYYSGSTYYNPSLKSRVTISVDTSKNQFSLKLSSVTAADTAVYYCAREKILPYYYYYYMDVWGKGTTVTVSSGGGGSGGGGSGGGGSGGDIQMTQSPSSLSASVGDRVTITCRASQSISSYLNWYQQKPGKAPKLLIYAASSLQSGVPSRFSGSGSGTDFTLTISSLQPEDFATYYCQQSYSTPLTFGGGTKVEIK

SEQ ID NO: 5382 - protein, 257 aa, Artificial Sequence
  HLA-C*07 antigen binding domain C7-14
EVQLVESGGGLVQPGGSLRLSCAASGFTFSSYSMNWVRQAPGKGLEWVSYISSSSSTIYYADSVKGRFTISRDNAKNSLYLQMNSLRAEDTAVYYCAIQWIYIYINPRGFIFLHDAFDIWGQGTMVTVSSGGGGSGGGGSGGGGSGGQSVLTQPPSASGTPGQRVTISCSGSSSNIGSNTVNWYQQLPGTAPKLLIYSNNQRPSGVPDRFSGSKSGTSASLAISGLQSEDEADYYCAAWDDSLNGWVFGGGTKLTVL

SEQ ID NO: 5383 - protein, 248 aa, Artificial Sequence
  HLA-C*07 antigen binding domain C7-13
QVQLQQSGPGLVKPSQTLSLTCAISGDSVSSNSAAWNWIRQSPSRGLEWLGRTYYRSKWYNDYAVSVKSRITINPDTSKNQFSLQLNSVTPEDTAVYYCAKEDVDFHHDAFDIWGQGTMVTVSSGGGGSGGGGSGGGGSGGDIQMTQSPSSLSASVGDRVTITCRASQSISSYLNWYQQKPGKAPKLLIYAASSLQSGVPSRFSGSGSGTDFTLTISSLQPEDFATYYCQQSYSTPLTFGGGTKVEIK

SEQ ID NO: 5384 - protein, 253 aa, Artificial Sequence
  HLA-C*07 antigen binding domain C7-12
QVQLQESGPGLVKPSQTLSLTCTVSGGSISSGGYYWSWIRQPPGKGLEWIGYIYYSGSTYYNPSLKSRVTISVDTSKNQFSLKLSSVTAADTAVYYCAREGVDKNTSTIYYYYYYMDVWGKGTTVTVSSGGGGSGGGGSGGGGSGGDIQMTQSPSSLSASVGDRVTITCRASQSISSYLNWYQQKPGKAPKLLIYAASSLQSGVPSRFSGSGSGTDFTLTISSLQPEDFATYYCQQSYSTPLTFGGGTKVEIK

SEQ ID NO: 5385 - protein, 241 aa, Artificial Sequence
  HLA-C*07 antigen binding domain C7-11
EVQLVESGGGLVQPGGSLRLSCAASGFTFSSYSMNWVRQAPGKGLEWVSYISSSSSTIYYADSVKGRFTISRDNAKNSLYLQMNSLRAEDTAVYYCARDRRGYFDLWGRGTLVTVSSGGGGSGGGGSGGGGSGGDIQMTQSPSSLSASVGDRVTITCRASQGISSWLAWYQQKPEKAPKSLIYAASSLQSGVPSRFSGSGSGTDFTLTISSLQPEDFATYYCQQYNSYPLTFGGGTKVEIK

SEQ ID NO: 5386 - protein, 248 aa, Artificial Sequence
  HLA-C*07 antigen binding domain C7-10
EVQLVQSGAEVKKPGATVKISCKVSGYTFTDYYMHWVQQAPGKGLEWMGLVDPEDGETIYAEKFQGRVTITADTSTDTAYMELSSLRSEDTAVYYCATGIHVDIRSMEDWFDPWGQGTLVTVSSGGGGSGGGGSGGGGSGGDIQMTQSPSSLSASVGDRVTITCRASQSISSYLNWYQQKPGKAPKLLIYAASSLQSGVPSRFSGSGSGTDFTLTISSLQPEDFATYYCQQSYSTPLTFGGGTKVEIK

SEQ ID NO: 5387 - protein, 246 aa, Artificial Sequence
  HLA-C*07 antigen binding domain C7-9
QVQLQESGPGLVKPSQTLSLTCTVSGGSISSGGYYWSWIRQPPGKGLEWIGYIYYSGSTYYNPSLKSRVTISVDTSKNQFSLKLSSVTAADTAVYYCARDIGTSYYYYMDVWGKGTTVTVSSGGGGSGGGGSGGGGSGGDIQMTQSPSSLSASVGDRVTITCRASQSISSYLNWYQQKPGKAPKLLIYAASSLQSGVPSRFSGSGSGTDFTLTISSLQPEDFATYYCQQSYSTPLTFGGGTKVEIK

SEQ ID NO: 5388 - protein, 249 aa, Artificial Sequence
  HLA-C*07 antigen binding domain C7-8
QVQLQESGPGLVKPSQTLSLTCTVSGGSISSGGYYWSWIRQPPGKGLEWIGYIYYSGSTYYNPSLKSRVTISVDTSKNQFSLKLSSVTAADTAVYYCAREVVEVFLYYYYYMDVWGKGTTVTVSSGGGGSGGGGSGGGGSGGDIQMTQSPSSLSASVGDRVTITCRASQSISSYLNWYQQKPGKAPKLLIYAASSLQSGVPSRFSGSGSGTDFTLTISSLQPEDFATYYCQQSYSTPLTFGGGTKVEIK

SEQ ID NO: 5389 - protein, 246 aa, Artificial Sequence
  HLA-C*07 antigen binding domain C7-7
QVQLQESGPGLVKPSQTLSLTCTVSGGSISSGGYYWSWIRQPPGKGLEWIGYIYYSGSTYYNPSLKSRVTISVDTSKNQFSLKLSSVTAADTAVYYCARDLYYYYYYYMDVWGKGTTVTVSSGGGGSGGGGSGGGGSGGDIQMTQSPSSLSASVGDRVTITCRASQSISSYLNWYQQKPGKAPKLLIYAASSLQSGVPSRFSGSGSGTDFTLTISSLQPEDFATYYCQQSYSTPLTFGGGTKVEIK

SEQ ID NO: 5390 - protein, 256 aa, Artificial Sequence
  HLA-C*07 antigen binding domain C7-6
QVQLQESGPGLVKPSQTLSLTCTVSGGSISSGGYYWSWIRQPPGKGLEWIGYIYYSGSTYYNPSLKSRVTISVDTSKNQFSLKLSSVTAADTAVYYCARESWKYFYPRGSIFIHYYYYMDVWGKGTTVTVSSGGGGSGGGGSGGGGSGGDIQMTQSPSSLSASVGDRVTITCRASQSISSYLNWYQQKPGKAPKLLIYAASSLQSGVPSRFSGSGSGTDFTLTISSLQPEDFATYYCQQSYSTPLTFGGGTKVEIK

SEQ ID NO: 5391 - protein, 248 aa, Artificial Sequence
  HLA-C*07 antigen binding domain C7-5
QVQLQESGPGLVKPSQTLSLTCTVSGGSISSGGYYWSWIRQPPGKGLEWIGYIYYSGSTYYNPSLKSRVTISVDTSKNQFSLKLSSVTAADTAVYYCARDRIVEVFYYYYMDVWGKGTTVTVSSGGGGSGGGGSGGGGSGGDIQMTQSPSSLSASVGDRVTITCRASQSISSYLNWYQQKPGKAPKLLIYAASSLQSGVPSRFSGSGSGTDFTLTISSLQPEDFATYYCQQSYSTPLTFGGGTKVEIK

SEQ ID NO: 5392 - protein, 250 aa, Artificial Sequence
  HLA-C*07 antigen binding domain C7-4
QVQLQESGPGLVKPSQTLSLTCTVSGGSISSGGYYWSWIRQPPGKGLEWIGYIYYSGSTYYNPSLKSRVTISVDTSKNQFSLKLSSVTAADTAVYYCAREKYFHDWLYYYYYMDVWGKGTTVTVSSGGGGSGGGGSGGGGSGGDIQMTQSPSSLSASVGDRVTITCRASQSISSYLNWYQQKPGKAPKLLIYAASSLQSGVPSRFSGSGSGTDFTLTISSLQPEDFATYYCQQSYSTPLTFGGGTKVEIK

SEQ ID NO: 5393 - protein, 250 aa, Artificial Sequence
  HLA-C*07 antigen binding domain C7-3
QVQLQESGPGLVKPSQTLSLTCTVSGGSISSGGYYWSWIRQPPGKGLEWIGYIYYSGSTYYNPSLKSRVTISVDTSKNQFSLKLSSVTAADTAVYYCARDLVDKNTSYYYYYMDVWGKGTTVTVSSGGGGSGGGGSGGGGSGGDIQMTQSPSSLSASVGDRVTITCRASQSISSYLNWYQQKPGKAPKLLIYAASSLQSGVPSRFSGSGSGTDFTLTISSLQPEDFATYYCQQSYSTPLTFGGGTKVEIK

SEQ ID NO: 5394 - protein, 244 aa, Artificial Sequence
  HLA-C*07 antigen binding domain C7-2
QVQLVQSGAEVKKPGASVKVSCKASGYTFTSYGISWVRQAPGQGLEWMGWISAYNGNTNYAQKLQGRVTMTTDTSTSTAYMELRSLRSDDTAVYYCARVQNEYFQHWGQGTLVTVSSGGGGSGGGGSGGGGSGGQSALTQPPSASGSPGQSVTISCTGTSSDVGGYNYVSWYQQHPGKAPKLMIYEVSKRPSGVPDRFSGSKSGNTASLTVSGLQAEDEADYYCSSYAGSNNWVFGGGTKLTVL

SEQ ID NO: 5395 - protein, 239 aa, Artificial Sequence
  HLA-C*07 antigen binding domain C7-1
QVQLVESGGGLVKPGGSLRLSCAASGFTFSDYYMSWIRQAPGKGLEWVSYISSSGSTIYYADSVKGRFTISRDNAKNSLYLQMNSLRAEDTAVYYCATANWFDPWGQGTLVTVSSGGGGSGGGGSGGGGSGGDIQMTQSPSSVSASVGDRVTITCRASQGISSWLAWYQQKPGKAPKLLIYAASSLQSGVPSRFSGSGSGTDFTLTISSLQPEDFATYYCQQANSFPLTFGGGTKVEIK

SEQ ID NO: 5396 - protein, 5 aa, Artificial Sequence
  HC CDR1
SYGIS

SEQ ID NO: 5397 - protein, 5 aa, Artificial Sequence
  HC CDR1
SYSMN

SEQ ID NO: 5398 - protein, 7 aa, Artificial Sequence
  HC CDR1
SSSYYWG

SEQ ID NO: 5399 - protein, 7 aa, Artificial Sequence
  HC CDR1
SGGYYWS

SEQ ID NO: 5400 - protein, 5 aa, Artificial Sequence
  HC CDR1
SYWMH

SEQ ID NO: 5401 - protein, 5 aa, Artificial Sequence
  HC CDR1
SYAMS

SEQ ID NO: 5402 - protein, 5 aa, Artificial Sequence
  HC CDR1
SYAMN

SEQ ID NO: 5403 - protein, 5 aa, Artificial Sequence
  HC CDR1
DYYMS

SEQ ID NO: 5404 - protein, 7 aa, Artificial Sequence
  CDR-H1
SNSAAWN

SEQ ID NO: 5405 - protein, 5 aa, Artificial Sequence
  CDR-H1
DYYMH

SEQ ID NO: 5406 - protein, 17 aa, Artificial Sequence
  HC CDR2
WISAYNGNTNYAQKLQG

SEQ ID NO: 5407 - protein, 17 aa, Artificial Sequence
  HC CDR2
YISSSSSTIYYADSVKG

SEQ ID NO: 5408 - protein, 16 aa, Artificial Sequence
  HC CDR2
SIYYSGSTYYNPSLKS

SEQ ID NO: 5409 - protein, 16 aa, Artificial Sequence
  HC CDR2
YIYYSGSTYYNPSLKS

SEQ ID NO: 5410 - protein, 17 aa, Artificial Sequence
  HC CDR2
RINSDGSSTSYADSVKG

SEQ ID NO: 5411 - protein, 17 aa, Artificial Sequence
  HC CDR2
AISGSGGSTYYADSVKG

SEQ ID NO: 5412 - protein, 17 aa, Artificial Sequence
  HC CDR2
WINTNTGNPTYAQGFTG

SEQ ID NO: 5413 - protein, 17 aa, Artificial Sequence
  HC CDR2
YISSSGSTIYYADSVKG

SEQ ID NO: 5414 - protein, 18 aa, Artificial Sequence
  CDR-H2
RTYYRSKWYNDYAVSVKS

SEQ ID NO: 5415 - protein, 17 aa, Artificial Sequence
  CDR-H2
LVDPEDGETIYAEKFQG

SEQ ID NO: 5416 - protein, 7 aa, Artificial Sequence
  CDR-H2
SFDWFDP

SEQ ID NO: 5417 - protein, 14 aa, Artificial Sequence
  CDR-H2
ERSISPYYYYYMDV

SEQ ID NO: 5418 - protein, 10 aa, Artificial Sequence
  CDR-H2
DSVIWYWFDP

SEQ ID NO: 5419 - protein, 15 aa, Artificial Sequence
  CDR-H2
EEILPRLSYYYYMDV

SEQ ID NO: 5420 - protein, 12 aa, Artificial Sequence
  CDR-H2
GGRAHSSWYFDL

SEQ ID NO: 5421 - protein, 17 aa, Artificial Sequence
  CDR-H3
DRIKILPRLGYYYYMDV

SEQ ID NO: 5422 - protein, 12 aa, Artificial Sequence
  CDR-H3
DTVIHYYYYMDV

SEQ ID NO: 5423 - protein, 16 aa, Artificial Sequence
  CDR-H3
DVIVEVFLSYYYYMDV

SEQ ID NO: 5424 - protein, 12 aa, Artificial Sequence
  CDR-H3
DIFIHYYYYMDV

SEQ ID NO: 5425 - protein, 14 aa, Artificial Sequence
  CDR-H3
DGTFYSYSPYYFDY

SEQ ID NO: 5426 - protein, 17 aa, Artificial Sequence
  CDR-H3
EWIKILPRLGYYYYMDV

SEQ ID NO: 5427 - protein, 12 aa, Artificial Sequence
  CDR-H3
DRSLYYYYYMDV

SEQ ID NO: 5428 - protein, 14 aa, Artificial Sequence
  CDR-H3
DKILAPNYYYYMDV

SEQ ID NO: 5429 - protein, 16 aa, Artificial Sequence
  CDR-H3
EKSWKYFYYYYYYMDV

SEQ ID NO: 5430 - protein, 15 aa, Artificial Sequence
  CDR-H3
ENTSTIPYYYYYMDV

SEQ ID NO: 5431 - protein, 19 aa, Artificial Sequence
  CDR-H3
EDVDKNTSTIYYYYYYMDV

SEQ ID NO: 5432 - protein, 17 aa, Artificial Sequence
  CDR-H3
DGGDIVSSSAIYWYFDL

SEQ ID NO: 5433 - protein, 14 aa, Artificial Sequence
  CDR-H3
DLILPPYYYYYMDV

SEQ ID NO: 5434 - protein, 19 aa, Artificial Sequence
  CDR-H3
ETWIKILPRYYYYYYYMDV

SEQ ID NO: 5435 - protein, 12 aa, Artificial Sequence
  CDR-H3
DLSRYYYYYMDV

SEQ ID NO: 5436 - protein, 9 aa, Artificial Sequence
  CDR-H3
EHIVLCFDY

SEQ ID NO: 5437 - protein, 15 aa, Artificial Sequence
  CDR-H3
DKILPRPYYYYYMDV

SEQ ID NO: 5438 - protein, 8 aa, Artificial Sequence
  CDR-H3
GSNEYFQH

SEQ ID NO: 5439 - protein, 9 aa, Artificial Sequence
  CDR-H3
GTSYWYFDL

SEQ ID NO: 5440 - protein, 14 aa, Artificial Sequence
  CDR-H3
EEIVEVFYYYYMDV

SEQ ID NO: 5441 - protein, 8 aa, Artificial Sequence
  CDR-H3
VDDYYFDY

SEQ ID NO: 5442 - protein, 14 aa, Artificial Sequence
  CDR-H3
STNILLSYTKAFDI

SEQ ID NO: 5443 - protein, 12 aa, Artificial Sequence
  CDR-H3
DKTYYYYYYMDV

SEQ ID NO: 5444 - protein, 19 aa, Artificial Sequence
  CDR-H3
EKYFHDKYFHDYYYYYMDV

SEQ ID NO: 5445 - skipped

SEQ ID NO: 5446 - protein, 14 aa, Artificial Sequence
  CDR-H3
EKILPYYYYYYMDV

SEQ ID NO: 5447 - protein, 21 aa, Artificial Sequence
  CDR-H3
QWIYIYINPRGFIFLHDAFDI

SEQ ID NO: 5448 - protein, 12 aa, Artificial Sequence
  CDR-H3
EDVDFHHDAFDI

SEQ ID NO: 5449 - protein, 19 aa, Artificial Sequence
  CDR-H3
EGVDKNTSTIYYYYYYMDV

SEQ ID NO: 5450 - protein, 8 aa, Artificial Sequence
  CDR-H3
DRRGYFDL

SEQ ID NO: 5451 - protein, 15 aa, Artificial Sequence
  CDR-H3
GIHVDIRSMEDWFDP

SEQ ID NO: 5452 - protein, 12 aa, Artificial Sequence
  CDR-H3
DIGTSYYYYMDV

SEQ ID NO: 5453 - protein, 15 aa, Artificial Sequence
  CDR-H3
EVVEVFLYYYYYMDV

SEQ ID NO: 5454 - protein, 12 aa, Artificial Sequence
  CDR-H3
DLYYYYYYYMDV

SEQ ID NO: 5455 - protein, 22 aa, Artificial Sequence
  CDR-H3
ESWKYFYPRGSIFIHYYYYMDV

SEQ ID NO: 5456 - protein, 14 aa, Artificial Sequence
  CDR-H3
DRIVEVFYYYYMDV

SEQ ID NO: 5457 - protein, 16 aa, Artificial Sequence
  CDR-H3
EKYFHDWLYYYYYMDV

SEQ ID NO: 5458 - protein, 16 aa, Artificial Sequence
  CDR-H3
DLVDKNTSYYYYYMDV

SEQ ID NO: 5459 - protein, 8 aa, Artificial Sequence
  CDR-H3
VQNEYFQH

SEQ ID NO: 5460 - protein, 6 aa, Artificial Sequence
  CDR-H3
ANWFDP

SEQ ID NO: 5461 - protein, 11 aa, Artificial Sequence
  LC CDR1
RASQSISSYLN

SEQ ID NO: 5462 - protein, 14 aa, Artificial Sequence
  CDR-L1
TGTSSDVGGYNYVS

SEQ ID NO: 5463 - protein, 13 aa, Artificial Sequence
  CDR-L1
SGSSSNIGSNTVN

SEQ ID NO: 5464 - protein, 11 aa, Artificial Sequence
  LC CDR1
RASQGISSALA

SEQ ID NO: 5465 - protein, 11 aa, Artificial Sequence
  LC CDR1
RASQGISSWLA

SEQ ID NO: 5466 - protein, 7 aa, Artificial Sequence
  LC CDR2
AASSLQS

SEQ ID NO: 5467 - protein, 7 aa, Artificial Sequence
  CDR-L2
EVSKRPS

SEQ ID NO: 5468 - protein, 7 aa, Artificial Sequence
  CDR-L2
SNNQRPS

SEQ ID NO: 5469 - protein, 9 aa, Artificial Sequence
  LC CDR3
QQSYSTPLT

SEQ ID NO: 5470 - protein, 10 aa, Artificial Sequence
  CDR-L3
SSYAGSNNWV

SEQ ID NO: 5471 - protein, 11 aa, Artificial Sequence
  CDR-L3
AAWDDSLNGWV

SEQ ID NO: 5472 - protein, 9 aa, Artificial Sequence
  CDR-L3
QQYNSYPLT

SEQ ID NO: 5473 - protein, 9 aa, Artificial Sequence
  LC CDR3
QQANSFPLT

SEQ ID NO: 5474 - protein, 195 aa, Artificial Sequence
  CD28 4-1BB CD3z intracellular domain
RSKRSRLLHSDYMNMTPRRPGPTRKHYQPYAPPRDFAAYRSKRGRKKLLYIFKQPFMRPVQTTQEEDGCSCRFPEEEEGGCELRVKFSRSADAPAYKQGQNQLYNELNLGRREEYDVLDKRRGRDPEMGGKPRRKNPQEGLYNELQKDKMAEAYSEIGMKGERRRGKGHDGLYQGLSTATKDTYDALHMQALPPR

SEQ ID NO: 5475 - DNA, 585 bp, Artificial Sequence
  CD28 4-1BB CD3z intracellular domain
aggagcaagcggagtcgactgctgcacagcgactacatgaacatgaccccccggaggcctggccccacccggaagcactaccagccctacgcccctcccagggatttcgccgcctaccggagcaaacggggcagaaagaaactcctgtatatattcaaacaaccatttatgaggccagtacaaactactcaagaggaagatggctgtagctgccgatttccagaagaagaagaaggaggatgtgaactgagagtgaagttcagcaggagcgcagacgcccccgcgtacaagcagggccagaaccagctctataacgagctcaatctaggacgaagagaggagtacgatgttttggacaagcgtagaggccgggaccctgagatggggggaaagccgagaaggaagaaccctcaggaaggcctgtacaatgaactgcagaaagataagatggcggaggcctacagtgagattgggatgaaaggcgagcgccggaggggcaaggggcacgatggcctttaccagggactcagtacagccaccaaggacacctacgacgcccttcacatgcaggccctgccccctcgc

SEQ ID NO: 5476 - protein, 22 aa, Artificial Sequence
  P2A peptide
VKQTLNFDLLKLAGDVESNPGP
